United States Patent Application Publication US 2026/0058010 A1 - sequence listing, part 10

SEQ ID NO: 107 - DNA, 308100 bp, Homo sapiens
  source 1..308100: mol_type = genomic DNA
tgagagacttatattccaggcaaaggctttgtgcaaatgcccatctaagccatgccctctgcaaggaatcccctttcttagtgatgatggtggggaggtggggagggtgcagtgcaactcccattcctgatctcctatcaccagagcagaagaatcactggagaacgactctgtctgaagcttgttcagcctggcttccttgagcaagcaacttattcacaggtaagtccaaattaatacagcgcacaccggctacataaatattgtgctttgattgtcttctgtaatcaaaggcaaggctgctgagtttgttactttccccaccatgcaactgctggaggagaactctgggggaagggaactgaggttgcccaggtggtttttgttgcatgtgtctaactgcaagttgtgtctctgtctatcgaggggaggataaggcccattacattcagattcaataagaatttatcaaatgcctattttgtgagaggcattgaaagacacagtatcttatttcatttttaattgaattagtaatgacttgataaggcacaaaggttagtctaactaacattttttttttccctgacatacgagtgatccctacactattggctgtgtccactttattgattgtgaaacagcctaaatgcatggaattggaaactggaagtcattctacacaatacaagaaagcagcaccatctttccatgtacctgccagtgctatggctggcttggcttttccagcagttttctggacttggttgaggtggcttcctaggggcattttctcaccccctcccagctaagactgctgttaattttgaataatttggaggatgctctaccctttggggtagcagagttttgcaacccacagatcccttttgccttgaggaatggtggtgatggtgggtgtcagagattctgtctgtataagtccccgggaaagctcagctgtcgcctgacccgagggtcgtgcagtttccttaaccctgactttaagtcagccctctttaaccccgactcccaagctgggctgtcctttgaaagaaaaacgaaaccgcccagttctgagcgtcggaaaatgggcactcgctccctgggggtttggggcaacttccccgctacgtcgcccagggattttaaataattgccagccaccagaaaccccctaacccttaattcttccctccgagacccagcccgctgcttgccacttccctctccaaacgctggcgggggtgggtggcagcaccgaggcgattttcttcgtctttttttcctccgggttttgtcatggaaacgctgacacaacctccagacggcggccgagcccggccggggactgagggcttttgggaccctgcgggagcgcggcgcgcacaccgcactccccgggcaacagctggacgcgaccatatcccgggtaggggcggggggagcgcgacgctccgccccggcgctagggtccctccctcctcccggctctccgcaggcgccctcccctcgccgggggccgcgagttgcatttggtaaaacccagccccggaatatatagatcgttggagcgcaatgaagtagcctttggagagaagggagagggcccgtcggacagccacagcggccagcgcagcggcagcggcggcggcaccaccatcaccgctcgcaccccagccgcccggcccgcgaccaggcagcggcggccgccggcgggatcggaggaggcggcggagcggcgaggaggaggagcaggagcgcgcagccagcgggtccacgcatctcagcacttccagaccaactccggcaccttccacacccctgcccgggctgggggctccgagagcggccgcgaagcgactccgatcctccctctgagccttgctcagctctgccccgcgcctcccgggctccggtccgcgcggcggggtccctgctcctgcgccccgggcgcgcttcccggacaccccggtccccgcagccaggacaaagccatgaagccagcgctgctggaagtgatgaggatgaacagaatctgccggatggtgctggccacttgcttgggatcctttatcctggtcatcttctatttccaaagtatgttgcacccaggtagggggcgcgttagcgtggttttgttggatattttcttctctctcgcgctctagctcgctccgcctgatttctgcctcttccaaccctacctctccgccttcggcctcttcggggctcctggctgcccagagctcctggctgcccagatctacccgggtcaccgcgtcgggatggggaggagaagggaaggtgtgcttcgccctcttcttcctaccggctccgggctggaggatgggaccaggaggggcggtagtttttttttttttttttttcttcttctttttttctttgtgtcccttgtctgtctgtctgcgaggtagcagggaaacggagaggtgtgggaagcaaccgggggtgaggggctggtttgaggagaacgaaactccctccctgctgctgccgaggtcggaggatgaaagagttacccggagccggctgctctgcgcccgggcgagccgcctcttcctggttgccgggccgggggcgaagggtgtacgccccggcgaggttgcgagtccctgcagcaggctgggagcccgggactgggctcccacgtgtcccgggctccgcgcagagctgagcaggtgtggagagtggtcgggtgcccagcgttgcccctccaccacgcgccggccgtttgcccccggggtccgggtccgcagtgaccttgcggctggtgccccggggcctgctccagcccccagccctgagctggaaactccgagctcctgggtcacgccttgaccactgcagttttggaggaaactttggccaggtcctgggctgaccgtccgtttgcatcccccacttctgggatccgagcaacgggaatcccccgggcggcgtgggaatgaaccccattcctccggtcccttgtggctcaggcaaagttccacgtccgaaatctggactgggggagggacgaggctcgtcgcttcctaggggtgcgagggaaagtttgggttctggagagggaggggcgccctcgagcgcggcggccgggggtgagcagctcggctgcgaagcccaacaggtagaacgttccgagaagccttccgggtaacgcgggtctccccgccaagccgtggctcccctgctcccttttaccctcccttagcagccccctgccgggccacgttggctcagaaatccattttctacgcctccgagttgcctttctcagcgtagtcacagcaataatttgcttttctaattgcaaggaggagggaggtggaaacgcatttccttccagggaagtggggttggtgtttttcatttttgcctcccgccttctcctttcactgtgtatctaacactttaaacagacgcagtcccgaattcatcaagcctgcgtttgggtcgatggcagaggaataaagctgttctttccatcaaacaggcagggctgcaggctgcagattccttgacagcgcagggacagacggcccctttgccccactcggtctggagcagttgttaaggcagccacactgccaaggatatggtccgactctaccacatgtaacctcaggacgtccgagccagccctgttaaagatggcttttgtttgcagctgggtatttttagtttaatgtcagcaaactacagcggtgtttgtctcctcacccaaacctgcggttgtgaaacttataaaggaatttaaaaatggacctggcttgcattccggcaggcaggccttggttgcagtgggcagggccagacagccaggggtatctcagagtgccaagctccagggcccaccggagaccgggccagactcaccccagagcgccaggggactggtggtgtacagatacactcgggttcaaacagtttaaacaaggggccggtgatttggtctagactctagagctgtgttcaggtttcgctgggaccgtgaatgccagtaatgctctgtacgaatgcccagaacacggatgagtgtcagccttcagcaggaatgcgcttgagcttctgtgtacctgttaattgcccagggaaatacaattgtcatggaattctttgtgagaattgggaaataactttctagccaaagatactagaaagaaacttccaacttgtaattgtcactttgtgaaaatttccagcccttgttagtcttaagttgacttgaaagtgacatcatatcttttcagcctagccttttggaagaggcagagaaccttttctaagcttgtgctgaaaaagatcctctgtcgatgatcctgccccatcctttatgtccccctctagtcctattttctcccattgtttattatttagatctctataaatatacttttctgatatttccctccagtccatagcaaatactactttcaaaacattgtgttgaatgtagaattacagatagttcagttgaaaggccttccttatttcagattacttacagtccacaaaagctctgtgtcaacagtttatcattacacggggcataaaaatatactttcaaatctacattaaacattttctttttgaggggttcattttattaagctacactgttaatgaccactgatgtggaatctctttcactggtttgaatttctttaaaagttaaagatccttgcttctctgaagtatcttgggggtaaggagagctgatccttcagcctggctctgcagtttctgtctctccagatcaccctgggagaggcagaagggaccacagcatggcacggattgtgtagctaaaaatttggaggcctctggcaggggttccagatacctacatgtgaaatagaaaaatagtattgcaaaagcaatgggttccaggcttcgttggtggctggagggtatgagaggagggagagaaagaaaaaaaggaaggcagggcgcggtggctcatacctggaatcccagcaccttgggaggctgaggcgggtgcatcacttgagctcaggagttcgagaccagcctggccaacatggcgaaaccacatctctactaaaaatacaaaaattagctgggtgtggtggcacacgcctgtaatcccaggaactccggaggctgaggcatgagaatagcatgaacccaggaggcagaggttgctgtgagctaagatggcaccactgcactccagcctgggcgacagagtgaaactgtgtctcaaaaaaaaaaaaaaaaaagagacaaaaaggagacagctggcaaggctggctgtccctctctctgattctaatctggggcccattatcttttctaattcatagaattgattaatttgcaaatttgagtaattggtcatcagttgcacaagggtttagcagaagtgggccttgtcagtaggatagttacatttagaagtttttgatactctgagttaatagtcttccttaagaatattttatagggcaaggaccaggttttagactccattttaatcccgatgttttttgcacggtgtctgacaacagtgggttctcaatagaatgtttgctggatgaatgcatgaagtggttaaactccagaagtagacccacttctctggttttcaggaaggtcacttctagccttgccaagaatgcctggtcaataactctggctctgtctggtggggaaacttcctgccttcctgaactgtgacacggacccagtttaaactaatcaggcgccagacaggagctttcaccgtgacctaaatttgcagcccgtgaggtgtaggcagctgaggcactgctctgtgtcctggattctggagaaggttggtcttgtttagccacttagatggattctaaggaaatccatccatagaacagacaccttctatggccgtgaactattcctaaagctagggagaatggaaccatatacctgtgatttctacacaggtttgagttcaccaatgaatgcttcctatgcaagttcatcagcttgcattaaaatgtcttgcatacctgccccagatggctgggttttgatggagctgtgtcatgcagtgcaaagctgagaggccccccaggctgcattggcacagagtgtgtaaaggcagctcttcagaaccttccttttgtgttactccataggattgtggtttttgtttgaaatctactgttcatagaaagaagccttcagaggagaaagccttttctctcctgtctgcttcctctctattatttttatttttgcaaaatgtttattttcactgtcacctgggatttctttgcctcggttgaatgtattgaaagattatatcctttatttaaagatgtctcattttacccccttgcactttcacttgatcaggttgaacctaaaatgcattttgtattataattttaaacgaattgtaaacataacatgtgctcattttagaaaatttaggaggtggccaggtgcgatggctcacacctgtaatcccagcactttgggagtccaaggcaggtggatcacctgaggttgggagtttgagaccaacctgaccaacatggtgaatccccgtctctactaaaaatacaaaaaaaattagccgggcgtggtggtgcacgcctgtaatcccagctacttgggaggctgaggcagcagaatcacttgaaccagggaggcggaggttgcagtgagctgagattgtgccattgcattccatcctgggcaacaagagttaaacaccatctcaaaaaaaaaaaaaaaaaagaaaaagaaaagaaaaaaagaaaatttaggaggtatagaagaaaaacaatcattattccaccaccaagaggcaactggtactttaaaaatatattatagaatatatttatatatatttatatattctgtatttttctcaactatgcaaaatgcatatacatagttgagataacatcatgcattttgtatcctgtttgataataagtattttagacaaatacatcattgtcacaactagttattaaagttaaagacaaagtttaaccataactgtttaaatgtatagacttgcatgtgtctccacctcccaccctacccctttgcaggatgtcagtctggtattattttttttgctgtggttgcacaaatttaatgttacgttacagaatctttttgcttatacatggaatagtttggagtcttaccaatttgtaggggctgttcttatgttatacacctgaaacttccattgaaaaggtgtcaagagggtctcaaatatgagactgttatgaattctgaaaacagcattgaatcactgaaggatctcatgtaccccataaatatatacaactactatgtacctataaaaattaacaagtaaaaaaataactgaaggagaagacatttttagcatggggtctctccttgatcatttaaatgtttgcacctcgatggagcattttcattgctgtgctcagatgagacagatgtaggtgatctcctttgattgttacagtcctcattttcattgccttccaaaataaaaaggggtgatcaggcaccacagaaagggtggtttgggggtttccgtggggtgaggggtgagggaatccatccttcagcagaggtatctgctgtcagtatttgtctggttgaaagatcattttgttcatagctttatcagcacagtcatttcaaaacaggaagtcaaaggctcataagcaaaggcaccaccctttcccttcttaaacccaccaaaaggacctctctttagtctggaggtcaagtgaaaaaggctctcatgaaagtcattgccagcaggcctcttctaagttcagactctgaggaaaaccagaagtcattctgctgattcatttttttttctttttagtttttcttttgaatttttgggacaccacctttataacaaataaaaggggaggcagttcttcctatgaacaatctgatctgtcagttaaaatttcctagaacttgtaatttgatgcatcttagatccaatgtgagtgattgaaacttacaagcagacttgttctcctcctccccagccccctgtctgtctgtctctctctcttttcctttcttctactctgtgccagatactgttcttggcactggagatgtaacacatacatacatctctgccttcatggaacttagattctagtggggcggacagactttaagcaaatgcagaagtgacatatatggtatatcagatggtgttaagagaaaaacaaaacagagaagatggttgaggggtgtgagaggcaggggttgcaatataatatagaggtaattagggaatgtcattgataagatgacactgagagcagacacctgcaggaaatgaaggagccggccatgttccaggcagagagcaacacaagtcaaatctggtccctgaggcaagaacacgcatggcaaggtggtcagagtgcccagagcagagggacggaggcagccaacaaccacagtggggagagacaagtcggagagagacaattgttttgagccttgggtttaactgtagatgggagggaagcgctgcagaagcttgagcagaggtctcttggggcagggaggcaaggaataagggtggaagcaatgtagcaagattgaaaatgaagtctcctacttgcacttttttttttttttttttgaggtggagtcttgctctgtcacctaggctggagtgcagtggtgcaatctgggctcactgcaacctctgcctcctgggcccaagcaattctcctgcctcagcctcctgagtagctgggattacaggcatgcaccaccacacctggctaatttttgcatttttaatagatactgggttttgccatgttggccaagctggtcttgaactcctgaccttaagtgatccaccctcctcggcctcccaaagtgctggtagaggtgtgagtcactgtgcccagctctacttgcacatttgtgctcatctttgggcagccggtagtgtactttggttaagtggtcaccatataagtcccatctcccctctaccacctgctcccccttgacccccaactagaccatctcctttttcaattttttaaaatttatctttatttttaaaaacagggccttgctctattgcccaggttggagtgtagtggtgagatcacggctcactgcatcctcgaactcctgggctcaagggatcctcctacatcatcagcctcccaagcagctgggacttacaggtgtgccacacacccagtcccatttccaatttttaaagcagtaatgaagagatctgaaaaagagatttgagaaaaattttgactgagcttgtagtgggaaattcgtaatatcttcagggtgcaatcggtggcatttgttaataaaaatatccagaaaaagtgccagacttaaatcagcactcaataaaaataaaacgatgaaatggatcagcgctctgggagtggaagacccgagtcctagtctggggtctcccatgtcctatccccataaattattgtgtattattgattccagaacatatttttttcacattttagtgattatgcaatttgtgttgtgattgatggcatctcagcaccgtgctgccctttaacgagcaactgtttcgtttcttagtgttccatcaaatagcagtgtgccttcaccatggatgccttctgaggccacctctgtaaattgtgaaagtactttatgtaaactgtggcacacttcataacctcagtaagtgatgaaaaatggcattcctccaagatgcagagtctgagggctcaaaagtacctggttagtcttgagtacttgcttctcaatggccagactggcatgcagtctgtccaagtctttttaactttgcctggcacttattttcagagcccagggcttgtagttagtatttgtctgattaacgatgaggttggttaagagttagaatggggagggtgggaagtaagtgatttaacttgaggcttgaacctggaagttcatctagaaatagacataaacattgcccagggaaagtatcaccaatgtggatttttgtttctttcaaggctactgagctgtcatgactttgtcatttctcttttctggcccttttagaaatgtactgtggttgtttgtttttttgtacatcttcctcttttgacatagcaaggcatggattctgtcaggttcatctttatagcctctgaccctggcccagaggtgcctaggaaacatttaaagagtaaataattgattctcaaagataagcctttccacctcggtcaccacccaatccatgtgcgcagaactcagaaggaggagccaggttggattgtcatgtacaaacagcatctgctgtggtctagtccctttgtctcccaaatctctttgcttctgttctgctgtgtttcagggcaggaaatagaaatcagtctagatattttattttttaatttaatttaatttttttttttgagacagagtctcactctgtcgcccaggctggaatgtagtggcaccgtctggctcctctgcctcctgggttcaagcgattctcctgcctcagccttctaagtagctgggattacaggtgcccgccatcacgcccagccaatttttgtatttttagtagagacagggtttcaccatgttggccaggctggtctcgaactcctgacctcaggtgatctgcccgccacggcctcccaaaatgctaggattacaggcataagccaccgtgtccagcaccagtctaggtattttaagcagaaagatatttactagagggaattttgtgcttatagaggcataagggggctggaggaatggggctccaggaatgtctcccagctaatggtagtagtttatataataattaataaacaaacgtatgttggcatggctgttcaaaaaaaacaaaaaacaaaaaacaaaactgactcactaggggtgctacaccctctgatactgtgtctggaactattgagttcaagaacaaattgatggcaaagccggagagtggaccctataatgctgttgcaaaaaaccctcgtgaccccatctccatgcttgccagcggccaaacagccccaaaggcaagaagatggcctctctgccccacatctgctttctaaatctcaagtgagtgcttctatttgggagagccaaattcacatctagaaccttagcttcaaagaagcctgggaaatacagcttttcaattaccagcctctgcaggctagaaagctttctagaaggagggtagaatgaacgatgagcaaataatcacaatactcaccacaccctattggtaaaacatatttgagcagccatccctcaatatattttgtttataaataatttctgcatattactaccattatctacatatctaggataggatcctttctgactagtgactgcaaacccctatgtcgttatctgttggataattccgttggctgactctttatcaattctgattctttcatccttttgaccttgtaatgttgtccacaaagatacaatggagagctagtactcaagagggaggaatgccattttcttgtgtgcctggattgtgacaattatcttcaagttgtggtttcttggctgggatctctttaggcctcagttctattttgtgaggaataggatagttaaaagtagataatataatctgtaaatttacttatgattcagttgtaaatggttattcattgaaatatgctgagaatggtggaattattgaggtggtcactccagttcattttgtggttgaggatacctgcctgagtttcataactgacatgtaatttgatatgacaggttagatggagttgtttgtggccatttgtattcttgatatagttaaaatttttttaggttaactgaaaatggaaggtctggtgtctagatgaacaaaaaatgggaagtctgatgtttccttcccggaccccttttgtggcacagtgtccactaggattttggaactccaggactagacctgccttgaatgtcattggttattgtcaaacctgccattgtcaactctgggtaaaagtacagtgttaacctggtgccagttctagcggtggtggaggcttagtttggctttagataagctgtatggggagggctgatatttccagcatcaccaggacttgggttctgtctcatgtagatatggatagagacaaagaaacctggtaatggaagtgtttcagtccttatcattctctggcttgaatcgttatcttaaatgccttgggagaagaaactcacaaaggcaactcaagtgaaagaagctggtggctgggtttctgttagaaactgttaacttcgaagaatctcagaagagggaaaccacagaggcccctctaaggtagtgttgtaacaggacacttaacatttcttaacggttgtcatattttacctttaatatcattgcataaggtcactcattatagtgaaaagagcacagaatttggagtctggacaccagcttttaggatttggctgttccctatatccatttgacatcattcaagatatttttgttaaatgcttactaagagttaagctctgttctaggtgtagaatcaaacaggtgaaaatccatgtcctcatggaacatacatcatagtgggggagacacaataacaaatggatattaaattatagagtatgttggaaggtgacaaatgctacgggaggcggggaagcaaggaagggggatgtgaagtggcagtggtggggggattgaaattttaaataggattgtcagggaagttctctctgcaaaggtcgctttaaagattgaaggagatgagggtagatgggagatgaaccaatgaaatagtaaagatatttattggatattatttaccgaaggccaacttgggtcaggcattgaatatagattactcccccatgggactcgtataatgtatacgctataattaccaccattttacaaggggggaaactgaagcatagagcattatcacttgtctaaggtccccaggagaggaatggatggaataaaaaccaaacccggctgtatgacttcatatccgctgctctgaacatctgggagggctctcatttgggcattactcttcccatccaccctaaagattggcgagaatgattgcagtttagtgatagacattctgcgaagggtgggacctttctgcccatcaaagaatcattctgcccaaatgccaccaatgcccctccttgagaaacagctcaaaactctatgtgtaaacagcatctggcgtagtacttggctgcatcccatgacttgggcaagtgcctggcaagtgtaggggcttaataattgattgaatgagtgactgagtgaaagtcgcagacaagagatttggtcccctcatttgccaagtgaaggtagtaatgttacctcttttatgggtggcggtggtaaagattaaatgagaagttagatgtgaaaatgcattgggaatggatgtaaacctatgtaacaaaactgcatgtcctgcacatgtatcctggaacttaaaattaaataaaattaaattttaagaaaagaaaaaatgaatgtaaaagcagtataaacatgttgttgttatgataaattacctgtgtggttcctcgttcaaggatgtgaatctccatgtcaacaagatgctgttctatttaattctgtttgaaacctgagcaagtttttatccttttaacatgtgcgtcctacactgtaagatttactgaaaggatctgacttctataagtgtgaggctcctgtgaatatcttctctctgtatgtgctcaccctctgtctgccgtactaacaggcatacccgctgccaaggccaaaactgtgtagcaatttgcaaagcagagtttatatttggtcagaaatcagccttgtgtttttttgctgaatgcagtgaccgcagcatttcctcccaattatgcacttaattactcctcaggttcccattagctttaactagtgacacttgggaaataacaggcactggtcaatgccatttctgaagctgaactccgaggaggatgaaaagcagtcatttcagaaaaataacagtggtagcatggcagcctgtatgtgagcagttgttgggtgggttagcatggctcattgcacaggacagcatcaattggccctatgtctccacattgggcttgttctgtgctgaggaggactttaagggctcttcctgtataggggtcagtccttcccactgcttaactgcaggtgtcatggagcttgctctgtggctggcatttgtagctggggcacagacccatttcctcccttcttcaccagaccaggtgctgaaatttagttcaaagactccataaccctgatctgggctaggcccggcattcttcaacctgaggccaggctcacatttgaaatagtccctgttaggctgcagagttatcatagaggaaggggagcatatttgtcagggctcacatttctttacaagttgaaaaagtttctatctttttaagcacccagacctctttccattccacctaatcattgatttagactatttgtttgcaactggtttgggacctccttcttcccccataggggacaggtggcaatgtctggagacattttgggttgtcattaactggggaaggtgtgctactggcatttagtgagtggaggccagggatgctgttaaacatcctacaatggataggatagacttccccacaacaaagaataggccagctcaaaatatcaatagtcgggaaaccctgtattagtctgttcttatgctgctgtgaagaaatacctcagactgggtaatttataaaggaaagaggtttaattgactcacagttctgcatggctggggaggcctcaggaaacttaaaatcatggcagaaggcacctcttcacagggcagcaggagagagaatgtgtgcaagcaggggaaataccagacactgataaagccatcagatctcatgagactcactcactatcatgagaacagcatgggggaaaccacccccatgatccaactaactccacttggtcctgcccttgacacatggggattattgcaattcaaggtgagatttggatggggacacagtcaaaccatatcaaacccttatttgattcaacatttttctgatgctttatgaaaaaaaccagtaacaacaatgaccacttaccaaatacttgctctgtatcaaacagtatgtcagctgctgtatttggattatccatcctatttaatccccaccacaaccttgtgagatgcacatttaccaatcccattatacaggtgaggaaactgaggcttagagaggtgaaggagcctgcctaatcggaaagctggaacaggatcctggctcaggtctaactgacagcaaacactgtactcttcacctcactagtatgcccatctccatgttcttggtttcagataattaggtcaagaagtaattatttcataaaggccttaagctcagctgtaaactctgtaagtgggacattcaatgatagccccttctcttcttaccctacacgctatccctggtgagctcatcctctcttggggcctggggtatcatctgtgtttagatgacgctcatgtctttcttcaacttggatgtgaccttgggtcgaagtctagttcatgtattacctcttgtgttaccatccatcccctcttggtcagaatgaggggatagatgtccttcctgtcatccctgtggtactttgtgtgtgtacatctctaatattactcattctgatacattgactccttcagggaaggggccatgtcttgtttagcacaatatcccaacatctccaatagagcctggtacataatggtcactcagtaactatttgctaaaagaaggaatacactgatggtaattggtcactaagaagaaaatccccctttttgggatagcgggtatggaattttcaatgctgatttgattttcattttgattctatggtgagctgtcacttaagagagccaagaacaaccccttttataccatggctaaatgtgaacagccaaaaagtgaacaactgtcaaagttgtaggaattgcatcactgtaaccacaaaggtaattaaatgtgtcccagaaagggatctgctaatttggtttgcaacgggagggtctgagacaagacttctgtagagcaacactgtccagtggaaatacactgctgctgcacacagaactaaatcttccggtagccatttttacattgaaaaaagtgaaaagaaacaggtgagattaatacctgaaatattgcaacaggtactcaatattaaaactcactgcaatattttacatatttttggtactaagtctccagaaatccaatgtgtatttttacaggacatctaaattcaggctagctgcatttcaaatgcttactagccatacgtgactagggctactgtaatgtatagtgtagctctaaagtgttagagaaccttttctacattgaactagggctttttttggtctcccctcaccctaatttaaaaaaaaaatttatggtgacagaatcttgctctgtcacccaggctggaatgcagtggcatgatcatagttcactgcaactttgacctcctgggctcaaggaattctcctcagcctcccaagtagctgggactacaggtgtgcaccatcacacttagctaatttttgattttttttttcttttttttttttttgtagagacagggtctagttatgttgcccaggctggtctcaaatgcctgggctcaagggatcttgcctcagcctcctgaagtactgggagtacaggcgtgagccattgcgcccgccccttccattttcttaaggggatgttgtctttcctgggttttagctataccctttgggaataatattgattatcttaaggctcaacatgttaaatacaagatattggctgcaaagttttatacacacacacacacacacacacccctctaaagtcatttcaggcctctaaggtatcttcagagtcttctagttaatcagtcgctatctgaagcttgattgtgctattgagatcttgacacagtctgccatgtagcaagagcaactgttactagctccattctacagatgaggcaatggagactcagaaggatttagggaattgcttaaattttgtttcaaatggttctaataccaacgtttagctgcaaagtctggcccaaggaacattcattctattagggtggatgtaaacacacatacttcactgtcttatggggccagatgcgattgctgttacaaagagagacaaactgtgaaggaaagggagaggagggtgattgattttggtggtggtggtgatggtggtggttgtggtggtggtggtggaaggaaaccttccagggaaagttgaggttggcaccgggctctgaaggatgagtagaaatttgctggcggaatctgggaagggagaggaaagacattccaggtgaggacgcctgccagagcagggagtggggcagtgaggagagtgatgtctgggaatacgggagcccaggggtggagaggtgaacctggatggctctgaatgctctaaagtttgagttttattcttggtaccagggagccacagaaggtttagtgtctcctgtttttcagatgatgaaatttaagctgaatttaaactctcttgtttcattagaaaggcagtagtttcaaactcactttctcaaaatgaactcggggccatttggaaatcgtttctattatcatcatttaatgggaggtaagattattcatgaacgactaaagtgcaaagtaagaaagagcttaaaggcactctgtagtgggatttgaaactcctctgttttgcattgctcgggccaaaattataggccatggaggttaaatttcagtctctcagttgctaatggtgccctagcttcaccctcagagggctctggaagcagtggcaggagaaagggaaagtgtgtaaatagtcgcagggaagagagtttcttgcttcagtgggagctcatgggtgtatccgggtcaggctgcagctgttgggctgccctagagatgagcagtgaaggatggagaacaaagtctgctgcttcctcctggaagcgagacccaagttcactgtgtgtggggtctgagtgcattgtacccctgaaagatgccgccctgtgtcctctttaaatcaaaagactgcctctttttttaggctccccttcctgggctgtgggagagggcatggggctattgtagagctcatacacaatgtaaaaaggcatctctctgtggctttcacagtcacttctgggggccattgtgcttggtacaaagctgagggctgcctgtattttctctgctagactgtagcacttgacgcctgtcgatgaataattgagagctggttttctcataggggcatctcaccacctttgatcccctttattttccgttaaaacatcaccatcatcaccaccaccaccaccaccaccaccgcgaccactacaaccacgacagggagaactcttccaaaggcttaattgaaaaagaaactaatataatgtaatcacagatatgcagcgtgttttaaagggggcatgtggacaggcaagctaaaagggtttctggatttacacttgcaaacttataaagatttagggattagagattggaaggtctaattgaggtagtacttattattggaagcctatgcaaaggtattggaatggggattattttgcaattggaagaattagtgaaatcctttaagagcgaaggtttcattatatatagggttttctgtataattttgctattcaaaaatggaagtgcaggtttgagatcagaaactgaacaggcaatcttttagttaattgtaataaaacagctttctttgggagagtgtgagccatcatccgaacgacaattatgtgcttaaaaatattaactcggaatagtggccttgctcactttaggataatccattgcattcaggaggggagcagctcagggctctttcttgggactctgcagagaattctttcaaggcttatgctgactttgtttcctgtgcctgtaaaagcaaaatgagatttttaaaaataaatccagggctgatagtaagtgccttcctgcaaatgagatttgagggatgtgcaggatgttgtcattggaaagtcacagcaacattccttttttattttcatgggaaataaacaaggaatggattaggaacacagaggtcattgctgagtgttcgatctgttataaaactccaacaaagtagaaagggcattgggtgggcattgggtggggcatcagggatcttgggttcttgtcccagttcttctgccccctttggggaccccacatgtgttactaacaatgtagatgttggcagttttcaaactactcctctaagccgaagcatgggggaaggtccttggacggcggtagggggtcccagtaaaccccacccccatcagagtggctccttgcttatctgtttcatatttttgggttctgagtaaaattttgttagaattaagtatttcagggctaaaaccaacaattttgcagttgactacttagactatttagactatttctaaggtctcttcccaactcagatctgatgctattagcagttctcaaaatcaatacacatttacatgagggttaaatcataattaaaatgaataattactgttcatgcagtatgaactgtctgacatctctccacccctccatccagcactcaaacatttattgaccaaatatttatctgagcaaagagacaaatctaaataagacttagttcctgcctacaaataacttgcaatttagcaagtggtgacagacccataattgttagctgtaatgctttataataatggctgtgggtggctaggaaaaaaaaaagagtaattagtttaggggaggtcagggaacttgacagaggaaggaacatttgagctgggctctggtcatttgttcagttatttaacaagcatttgttgaatggctactgtttgtgccaggactgttcctgtgctagggaaacagcaggggacaaaacagacaatgatccctatcttaatagagctcacgttcttggcataaaatttatcaaggggcaaggttggtggccccactggctccttcaccatcatctccctcccctgccctatgatgcctcagagtaaagcagcattatatatatatatatatatatatatatatatatttctgattatgaaattaattcaagtgtattatagagaattttgaaaaaaggaacttacttccaaaaaaagttaccccaatccctgccatatatatgcatatatatatgtatttatatgtatatatccatggaaaaatagaccagaaggtcaagagatttttcctgggtggcagggattagggatgaatttttttgaaagtaggtcccatatatatatatatgacttttttttagaagcgggtcccttatattatatatatttacaaagatatattttaaaaagttatccctcatatattattataaatgtatacatttataaataaatatattataatatatacatatatgtaatacttgtaatatataattacatatatgtagttatatatgtataaattataattatatataaatataaataataatatataatataatatattatatattataataaatatataaataaatagaattataattataaaaattataataaacacatgcaaaaacaatattacatatatgttatatgtaatagcatatgttacacatatatgtaatatatgtaatatgtacacatgtagtatatacacatatgtgaataatatatacatatgttatacacacatataatatatacacatatatgtaagatatgtaatatatgtgtgtatatatatttacaaagatgaaatcgtcaggcttacagtgtattttgctttttccatgtagcaccgaatcatgggcattttctcatgtcattcagttttctctgacaacactgtaatattccatcagatggatgtattttcattttgccattctcctttgttgaatatttttgagaaagattttcccttttaaaaaaatgccgttttttttgtaaactaaacttttgtctgagtttcttaatgtccctttcagataaaatttcagaggggcaattcagaggttataaacctttgaaggctcttgataagtgtaaccaaattattttctagaagattgtatctattgatgctccaaccagcagtgtgtgaatatgtccatcttactatatcccagctcctttgattaagctgtcatccagattcctgatggagccttcctctatctcaacattcatgcttgcattgagtttttggtccatactagattataggcttctggaggccacaaactgtgtccccagtccctggcgtatgacagacttgtaataaaataaatgtttgttgcatacatgcttgcatgtctgaatgaatgagccaaggaaggtaaggagaggtttcacttgatctgggaagagaacagaactttcttcagatgtcacaaagtatcttattaatgggcttccagggatagggggattcatgaatggacaagtagcttgctgtaaagccacctccataccctcagtgcctgtccaagagtcctataatagatcatccttaggattcaaattcaatgaaaagatacattttcactgctactcactaggtacccattacaggtgttaaatcatttagtcttctccacagcctggcgaggagaactggcctcatcctcatttttaggtgggactcagagaagttttgtaattaacttaaagtaacccagctagtagttggtggagctcggatgccctggctcatctgactcaaagtgctctaataagaacttctctctgcaaagcgtgggctggcatctgcgagaaaaatttctttttgtgatttaggaggaaaaacatatggagaaaccctattgtctgaatgctgcgtctctccctaattcatgtgttgaaacctaatccccaatatgaggctcttagaaggtggtggtctttgggacgtgattaggtcatgagggagccctcatgaatgggattagtgcccttataaaagagaccccagagagaccctcacctcttgtgccatgggaggacacagtgagaaccaggaagtgggacctttccagacaccaaatctgccagtgcctcgatcttggactttccagcctccagaactgtttgagcaataaatttctgtagtttacaagccacctagtgcaggatattttgatatagcagtccaaatggactaagacaaggaacgatccttgagctgaaaggaaaatgaacaattgctctgcagttggaaagacacaatgatagctctaggaggcattgtgcactcaattgtcctcaactgattggagaaaggaattcagttatgaggaagttcatttagtgagaaggtctaagagctcttcacatgtctcctatgactctaagaagggtgatggctggcagcaccctgagaatgaagcctctccagggagctgtgtgttgatggggctctcaagtttgggaagcaacccccctaacaggaagtgggggtgggagacagggagagaaaaaccaaagcaaacccataactcaaactgtatctttcttcttgcaaaagtgaaagacattgctgatcgttacacacacacacacaaacacacacggcagatggagcttcctgtgtagtatttctgttacttatatctccagaaggaaggcctgggtatattttaattttattattttcttttcttaaacattaaaaaaatgatttccactagcccataccagagaccccaaaatacactgtaagtaaaaatgtgatgtttgccacgtgaatgcagtgccagcacctctcttccaccaggtccacgtccctaagcctttttatatctgaattctggagtctccactgaccccttccccatagtctcttttatgtacaccctgacttcccagcagcagagtgccgagatggaagcggatgaggggaagtgagaataagtctaaaatagctgtctattaggtttcctgttaagtaggatgtggtcagttagcttcggttatctgtaagtctagttcaggctgttcctgttaacagctgagtattcacggggccccagagcatggaggtgcttgcctgggaaggaaagcaattatcagaaatgttggggcccagtcactaccttgaggaaaaccggtgggatttagccttttgggaaataaaggtggtgttccctgtggccatcagcagcagtggcaggcaatttcaagagcttcaggaggtgactggaaccatctagtctctggtcatttgggggatgagatgacatggtttggttcttaacacatagtgggagaggcagtgaactggtgccttcattctagggggttattgaaaaggaggtttttaaaactggaaatgacaacatggaaggagcctttaaacagtgcatgtccaaggcatgtccaaggaaaagccgttttcaaaagagtcacctgtctttacttggcatttccaaacttgcctcagatatctttctgagggactcttaacgtattggtagaaattggatgcaactccttcctttcccaacccaactcaaattggtttaagcaaaaaaaaagggcccccccttttttttggctcagggaactgagccaaactcagtgtggcagagaccaagcaccctagcatgtgattgttcatgctgtgtctgtctcctcatggtggcaagatggctgcctgcggttccagcctccatcctagcctttcagcagtcccagtagaaagagagagtacttcttttttccagcagtttccacaaaagttctggaatgtaaagttcttaagggcagggatttttatattttgtttactgtcatccccagctcctagaacggtgcctgtcctacagcaagtgttcagtaaaaatctgttgagtgagcaaatctcattggtgtggccgggatcacatgcccagtttgagagtaaggttgggagtgagagaaagaaaactggagatgctcttatccaagacaggcatcagatcttgtttttctgatgaataacaaccaagagaggcaagaggtaaaaaatatataattagattttaaaaagtcttgcactcttaggtagtaggtagtatgctaggaagttttttgccactaggaaaacctatttggactgaaaatggccgcatgaacttttgattctgtttacctcctgttgctagaagacaaatgtgttcctatggcttgaagaagccacaggacatatttttctcatgtatgcatgccacttgttgaagatggctcaccaccatgtctgccttcctgccagtgggaagagggagagaggtccagcggagggcattccccttggatccatcacttttgcttaaatctcacttagctccagccatttatgtctgtgggggaggctgggaaaggtagtcttcattccgtgtggtcatgtgctaaacttgtgttttctttattctaaaggaagacagagaatggatattgggggtcaaccaggagttctgctgcaaaaggttctatactttagttggtcagtgctctgagcccctgttgaattcaggcctatctttcataaacatctgcttagtcagtgcactgagttgatagtgtccccgcccccccctccaaattcatgttcttcctggaacctcagaatgtgacttgacttggaaataggggcattgcaaatatagttagttaagatgaagtcaaccaggtgcagtggctcccacctgtaatcccagcactttgggaggctgaggtgggtggatcacgaggtcaggagtttgagaccagcctggccaagatggtgaaaccccgtctctactaaaaaatacaaaaaattagctgggcatggtggcgggtgcctgtaatcccagctactcaggaggctgaggcaggagaattgcttaaacctgggaggcggaggttgcagtgagctgagatcgtgccactgcaccccagcctgggctacagagcaagattccatctcaaaaaaaaaaaaaaaaaaaagatgaagtcatattagaggacagtgtgcccttaatccaatatgactagcgtccttattataagaggagaagagacacagaaacacacataagaccgtgtgataatggaggcagagactggattgatgctgccatgagccaaggaatgccaggagccaccagaagctggaagaaacaagaaaggatccttctctagaggcctcagagagggcatggatgggcctgccaacatcttgattttggacttgtggtctccagaaccatgaaggaatacatttctattgtattaagccaccaagtttgtggcactttgttatagcagtcctgggaaaatactgcagtctgaaggaacacatttcttgccttgacccagtagggattctttccagttggagtcaggggatgtggcttcttagcttcacccctgtgccgggatgtgactcagcagaggtcacttaacctctctgtgccgtactttccagctatgaaatgggaagagagctgcctttctgctctgctgtaacactgcaaaggtacagcctttcatgacttctcattgcacccagaagagaaacccaaatccttagcctgacttcaaggtcccgcctcactgaggcctgcctggtcccacttccttgttcccctgcccagctggacttgcgccactctgccttctttcagtgccttatgagcaccacactcttgccacgtcacgaattttgcacttgccgttccctgtgcttggcgtgcttttccttcaggtcccgtttaatgttgcttcctcgtattggccttcccagttgggtgcgctggaataagttatcacttaaaaaaagtaatctactgtcatactttacaatttttagaatttggcccagctttttaagccactgaaagaaatggtttcaaaaaccaaacctgggtgcagtcacctgagcccactgttccagctggtggcttccttctgtagggagcggtcatggattctctcacgcgtcgatggggggcaacgatatcagatatggcaaagattggctaagaaagggaaggcatttttggagagggctttggggtttctgatacctaaatgtctcatccaagtgaacagagtatttactcgtctatgacttgaaaaaagaatatctttttgatgttattgtaaataggactgtttccttccttctttccttccttccttccttccttcctctctccctccctccgtccctcttttccttcctttctcttgcattttttttttttggagttttgttcttgttgcccaggctggagtgcaatggtatgatcttggctcactgcagcctccacctcccatgttcaagcaattctcctgcctcagcctcccgagtagctgggattacaggaacccgccacaatgcctggctaattttattgtatatatatatattttttagtagagacagggtttcaccatgttggccaggctggtttcaaactcctgacctcaagcgatccacccacctcagcctccccaggattgttttcttgattttatttttggatagattgttgctgatataaagaatgtatggctctttttttttttcctattcctcactaccttctgccttcctttcgccttcccccatcccttctctttgctgaagacggtgtgtcatctggggtaaccctgggtatttacgagccagtggaggctgctctgccacctggggctgctgggccccagagccacatcaaacagggagcccccccccgcaaaaatgaaaggaggccatgtcaaatgggcagctggtgtttacttcttttaagtttaggcacatcctttacatccacatggctttattttttaggcaagtgggctcaccactttcctagaccatgtggccactgcctcccttccctttccccaccctcagtgtcattttggcttttcccacagaggaaaggctcacagaactccaacgtggttctgcttgcttagatcgatgagacaagattttggtcctttgagcaaggtaggagttgttgtaataagagctgacaattatggaggacctagtgtgtgcccggagcttcacacacattgcctcaaattctcacaacggcctcataaggtacatgttacctggacaaagacagcagctcagagaactcattccacttacccaaggttgcagatttcaactcggtcccaactcactccagagtctgtgcatccccccacttaagactttaatgtcttaaaaatgtccccacttcttctgtcttttagtggcttcacgtctgaagtctctgcttactttttggaacagatggtggttctcatagacttggcccggagtcagcatgggagaaagtcatcctgtctgaaacagtgctgattcgggtcaccacagattcaaggtttctaaccttggctctacttaagaacaacttggacatcctttcatgtagttcattgatacccacatgcctcctggtgcaatatctccaaaactggactcctgcatcttcacatgctcacccttcacaccccatccattctccacacccttcacatcccagttcctgaaggcaggtcccttggttacagtctctccccatgcatttggttgttttttgttgagatggagtcttgctctgtcgcccagactggagtgcagtgacgtgatctcagctcactgcaacctctgcttcctgggttcaagagattcttctgcctcagcctctcgagtagctgggattacaggtgccagccaccatgcccggctaatttttgtatttttagtagagacaggattttgccatgttggccaagctggtcttgaactcctgacctcaggtgatcggcctgcctcggcctctcaaagtgctgggattacaggcgtgagccaccgtgcccggcctccccatgcactttgactttttttcattgcactccatttgtccatgcagcaatccctcaggatgtgattcattcagcctgccaattttggataataagagaagagagttcagatacaaactccccaatgttacctgcatctctttggttcctgcttttggagagtaaggggtacctgagtttgttttatgtctcttcttcagtattctgctccacaagctccacgtgtacttattcctcagtacgcccccttagtgagtttgtttattgggtgagtgaaaggaacagatgagtagatgaatgacccaggtgaggcctggggtcggggaggactgtggctcttcttacctgctgttgaagctggcctggtggaggaggctggaggcaaaggtggggacgtagtctctgtagcttctgcaagtagagggtctgctgctggggtcagggaggatctgaacctgggcctgcttgactctacagtctgtttgtttctactactgtctgcgaaggtctgctgtttctactgctacatagtcacctgcatctaggtcttctttttgccattgttgggaattggcataagatggaatgagattagatggcatcatggtcagagtgacccatttcctaatggttcctctcctggttagtggctggagtgggcaacagagacaagtcatctttcagtgggtcattgccaaggagggaaagactgggcttggagagctgtgtgctggttcctgggaacaggcatccttggcttgagatcacaaatgggacagccccatcatgacgattcacgatcacattaacatactcagtgctctgggaagtcctgccattaagaaccccagttaacccagaatttcttaaacttacacaaccacagaatcttttttggggactggagaggtaccacttcatttattcattaaatagttactgagcacctaccctgtgcagatgctattcacacctgagatatggaggtgacaaggcagacctggcaaacttacaatgttctcatctataaaatgggtatacaggagtgtctaccttgcagggttatggtgaggtctacatttaatgaactaatgcagggtaagtgtttggcacagcccagggacattgtaagtggtcagtgatacatatgtatgattgttatcaccctagtggaggatcagatattaaacaattaaacaggtacctatttagtaacaatggcgttaagttatacaaaagagaaggacagggtgtcaagagagcacatagcaaggaaacctaatgaatgttggcaggtgggatggcggtagtggtcacagaaggctctctcctgagcaagccatgctgaagctaagacatgaaggatgtggggattgttggaaaagagtgggaagggagtgaggcctccttgccttgggaatcatggcccgaatgtcaggggcttacacacacgggtgccgtctggggagttaaattctctggactgtctatttcagaattagggaggtaggggcaggctctagtaggctgtggggtccagaaatgaatgtctttaaaacttaccccagaaatttggagcacccttgggaatattttttggaattgctgctccaggacagcgggcctcagaggttcatgtgcttagaaatcacctgagtctcactcaaaatgcagccgtggggcctgggaatctatttaacagacacatcctgaggcgattctgctgcaggaggttccccgaccttgctttgagaaacacatctctggaagattgactcttataaaaaatcgggaacacgaaggcacgacagcaaatgattccagcagagaatatacaggggcacctctagagactttgtatttgatcttagaaagtacacagtgggcaagaagagtggtatgcaaccccatgtcaggagggccacagctgcagggagcggggctcggaggagctgcagatcctaagaaggatccacgacctttgggaacctcgctgtttctggccttctgctcaccgcagagggtgaactggccatctgacacccagctccaacttcagggttgttcaatgtctgtgtgcagttgtgacaatggcagaaacaatcggtttagactttctctgcagaaggtagactgactcgggcacttctctatgttccctgacattgccagtcttaggaattggtcgtggggagccttgaattcaagcccaaagcaactttaacattcataaccacaacgcatctgtaatcagcgggacttatcatgagttcttgagctgcaaatggaaacggtggaaactgaacagacctcctaccacagacttcctgctgatccacctgcctcctcccttcagggccccttgggttgtaatcactgatgcaccattgttaggcggcagggtgatttaaggtgaattgggcctttgcacggcctgcttggttaaaagctggagcataagtcatcgcaccattctgtgtgcgtgtgtgtgtgggcatgtgtgtgcatgtgtgcacgtgtgtgcctgtgtgtgcctgtgtgtgtgtgcccatcttcgtcttccttcccctcccagccttccctgcctgggctttggggctccctgtgctgtgaatttcactttgctgggttacttccagtgcatgctgctagtcattcttgcttgacctttaaatttttctctttagggaaaatatgatcattagtctgtgttctccagcagatgtataccagtcacgggcagtcttcctgcttcacttcacatccatggggaaaaagtgttttaaagtcagtgtgatttttttttttttttaatgacacagaaatgaatattagactagagggccgctctgtcgaatggctgtttggacaggaatcggggaatgcagcggggtgctcccagctttcacaaatgatgacttcagctgtttgggggtctgacttcttgcctgttggtgacacagtgtggctggactgtggggttcaccagccagaacttaatcctgggcttcacagcccatgcatgcatgagagagtttgacagatgtgggctgcattttctggtacgtctggatggtgagattgtctagaagggtgtgtttctggaactttccagtcaggcttcaccatggtgagtatttaatgaccacacacgaaagcctcattgccagggccgctccctggcacaaaccgaatcatagaatcatggaatttcagagctggaaagagcccctgagccgactgaaggggaaaagaacttccctgggagtaggaagacccaaattcggggctcctgccctactcccattgcagctgaacatgatttctgaaggaagagcatgtttaaaacgaaggggggcatactagccttctaccctttgttacacaaatacataatagtccaattcagcaatccaacagcgcaaggcttttataaagaggcatgcccagatagagttaggaatataccaaagcaaagcacatttctggtctgagatattttaaagtcctctcttggttttcggtgaatcctttggtcgatacagtagactttataaatgaagaacacaggcttgccagattatagtttctgtctgcctaaaaatagccttctttccatcccatgactgtcaagaattcttgcttgtaataaccccgttatcaacattactagactcataataatgactgtctcttcttgagtgcctgatacatgctatgccaggtgctttagaaacaatatgttggtttttctttttttgttttgtttttcttgagacagggtctcactgtcttccaggcaggagtgcagtggcatgatcatagctcactgcagccttgacttcttgggcttaagcgatcctcccacctcagcctcacaactagctgggactacaggcacatgccaccacacctggttaatttttaaactctttgtagagacaaggtctcagtatgttgccccggctggtcttgaatgcctgagctcaagcgatgctcccgcttcaacctcccaaagtgttagtattacaggcatgagccattgctcctggcattgtcttgtttaatacagctttagagatgttttcattgtccttattttactgatgaggaagttgggcttggagaggtaaagatatttatctgagctcaccagctgaacttagattgctggctcctttaagaatcctgtaaaaatgcatacgaaacagtatgtacctatttttttttttttaaacaaagtggagcttcctgggtgaacatagagttgcttatcatttaattatttgtattctcttgcatgtctccttgcgtggttaaaatactggtacatttttctttttttttctctatttttttttcacaaggagataccacttcgtacatctattagaagatttatttttatttttattttttgagacagagccttactttgttttccaggctggagtgcagtgacacaatcatagctcactgcagcctcgaactcctgggctcaagcaatccccctgcctcagcctcccaagtagctgggactactggtgcgtgccaccacgcctggtttaaaatcctggcaaacttttcaaaaacaaacattatctggcaactaatttttttatatggatgattttttttttctttttaattaagctagcttgttaggggcccagggcttctgagaattggctttgcacatgggaaccacgttcaaaggacggagaaagatgttgctgcccaagatggcaggtgcaggtgagggtgctgtggagggtgaggaggtgctccacatgcaaagccccttggggagcctgagagtagagaggtctgtgtgtgtgtatgcatgtgtgtgcgtatgtgtatgcgtgtgtatgtgtgtgtatgtgtgcgtgtgtccaggtatgtgtatgtgtctatgtatgtgtatgcatgtatgtatgtgtgtatatgcatgtatgtgtgtatgcatgtgtatgagtgtgtgtatgtgtgtccgtgtatatgtgtgtgtatctctgtgtgtatatgtgtgtatgtgtgcgtgtatgtgtgtgtatgcgtgtgtatgtgtgtgtatgtatgcgtatgtatgcgtatgtgtgtatgtatgtgtgcatgtatgtgtgtgtgcgtgtgtatgtgtgtgtgtatgtgtgcgtgtatgtgtatgcgtctgtgtatgcgtatgtgtgtgtatgtgtgtatgtgtgcgtgtatgtgtgtatgtgtacgcgtgtgtgtgtgtgtgtgtgtgtgtgtgtgtgtctatacacataccaagcctgtttggttgttcaccgttgtgttagtttgctagggctgctataacaaagtactgcaaactgggtggctcgcagttctggaggccggaagtccaggatcaagatattggtaggttggttcctcctgaggcctctcttcttggcttgatggccaccttctcactgtgtcctcacatcctcacatggtcttttacctctgtgcacctccctgatgtctctttctgtgtcctaatttcttcttcttcctcttttttttttccttgagatggagttttgctcttgttttgcccaggctggagtgcaatggcatgatcttggctcactgcaacctccacctcccaagttcaagtgattttccggcctcagcctcccaagtagctgggattacaggcgtccgccaccattcccagctaatttttgtatttttagtagagatggggtttcaccatgttggccatgctggtctcggactcctgacctcaggtgatctgcctgcctcggcctccccaagtgctgggattacagttgtgagccactgcgcctggccctaatttcttcttacaaggacaccagtcagattggattagggtccatccactgttttgacttaattacctctttaaaggccctgtttccaaatatagtaacattttaaggtccttgggggtaggaataccctatcttttatttatttatttatttatttttgagatggagtctcactctgtcgccaggctggagtgcagtggcacgatcttggctcactgcaacctccccgtcctgggttcaagtgattcttctgcctcagcctcctgagtagctgggactacaggcatgcaccaccacgcccagctaatttttgtatttttggtagagagttggccaggatggtctcaatctcttgactttgtgatctacccacctcggcctcccaaagtgctgggattataggcatgagccactgcgcccggccagaataccctatccttaaacatgaatttaggggaggggaggacacaattcaatctataacaactatcactggctgattttggcagaggcctgtggcctccagtattttgagggagctgagggccactgatctctccatatgctctcaacatcatgggactagtaggatgaaagcaagcctcagaccagattctacctcaagcaggcacacaaacattcatgcagcttctacttggagcctgatgaagttcaaattgtttgtcctctgaggctctctttgcatggaaatttctcccatgacagatgagaaagttctggggcagcattcagctttctagttggattaggcaacagaatcctttgaaaatgtctgtgcacagaccaggtggctctctgggccagtgtactctgaaagatgtgtgtcctggcctagctggttgaggaaaagcagggcaagcctagccaaatcacacatcttgaacagccctcattcgttatactaactttcccaccctctggtgtgtataggagataaagatggcagacgtgctattaggctgccaatgggagtgggctctgatatggtctttcaaatatgaatcacccctggcatgtgtgtttcctgtttaaggttctcaggtattacccaactgcaccaatattaaaatggacacataccgtgtcatgcagttggtgccgaagtgttttaagggaagttgtaggcaatgtgagtttatcagaaaacttcaccatatcagcattttgccctgagcttacaccattcccagatcaaggtacaagcacaatgatttcctttcttgaaaagttcaacaaaagcaagagagagagattggagttgatgctgcatttttattctgtgttaagtcttgaacctgctgttgctgaacattggtcaggggaatttgagaagtggaaagtgggcttttttcaccctttgaaaagagaggatggattcttcaccagaactgacatttaaaaaaagtcagcgtggcacgttttagtatgtgtggcagatctaaagagacaatattttgatctcaggagtgtttattcttgaaccattttcagaactctaagatttgagaaataataaaatattgaccatccttcaaagagaaaaacacagggcgatctttggcatagcctgtcattttgctcacatttcacttctctctctccaacttcagagcccctgctgtggaacaggtgctgtgctgggtggcaggggaggtctctggcttttttttttttgatctccgtcttaacatctagcctactggaggaagtgtatttaatcatccacttatctgttaacaattatctctgagggcccgtcacattcagagaagattctaggttctctacaagtatcctctcactgtgtacatactaaatcaacatcctgctggatttcccccagacatctcccttcatcaccattggagagtatcctctaattgccagccctattcaccatactcatctcatttgatctggagttttctgagagtgaccgggggtgggatggacaggataatttagcaagagtgtataagtaaaatctatataataaaagttatctccctgtgccccccatgatctattctttatgtagcagtctgaatgagattttcagaaacaagaaccactttaccttagtctcttcttcttcttcttcttcttttcttttctttttttttagtattatggggatctgtttctgttgcccagggtggagtgcagtggtatgatcttggctcacagcagccttgaactcccaggctcaagtggtcctcctgcctctgcttccctagtagctaggactacaggtttgtgccaccacacctggctaattgaaaaaagaaattttttttcaatagagacagtgtcttgctatgttcccaggctagtctcaaactcctggcctcaagtgatcctcctgtctcatcctcccaaagtgttggaattacaggtgtgagctactatactcggccagtacccttctcaaaacacttcagcacttcccattgcacttgggttgaaattcccaccactcactggggcccacaagactcttcaagactgaatccttgctcaacattgtgacctgccccctaccacctgcagcctcacttgctgtgctccagccatgtggatcttcctcctgtctctaaaactgcctcaggtcatttgcacctgctgttcttcccaaaggctgtgtgatttccatcagtcagtcttagctcgtatacctccttggagacacctcttctgaccaaccagtccaaagaatctcctcttaccatgtcactctgttttatttatttatttagagatggagtctcgctctgtcacccaggctggagtgcagtggcgcgatctctgctcactgcaagctccacctcctgggttcatgccgttctcctgcctcagcctcctgagtaactgggactatgggcacccaccactacacccagctaattttttgtatttttagtagagatggggtttcactgtgttagccaggatggtcttgatctcctgaccttgtgatctgcctgcctccacctcccaaagtgttttatttattttaaaggcatgtatcactctctgaaaattagcttctttcttctttttccttgttatcatccatttccccgaaccagaatagaagttcctgaggccagaacttctgtctctctgcccctcactatgtgtctctggcacataccccagtgcctgcctgctctaaagtaaaatcttagtaaatattactgttgactaaataaatgaataaatcccttttaatgccctttggaagttgcaagtaaagaataggatccctttttaagattacacttttggctattgatctgtgtgtctggaacaagatacagtttgaagatactaccatgggacatgacatcagttgagctgattaaggttttagtaataagaatccaggatgtgtccgggtgcggtggctcacgcctgtaatcctagcattttgggagaccgaggcgggcagatcacgaggtcagcagtttgagaccagcctgaccaacatggtgaaaccccgtctctactaaaaaatacaaaaattagccgggtatggtggtgtccacctgtaatcctagctactcaggaggctgaggcaggagaatttcttgaacccgggaggcggaggttgcagtgagccgagatcacaccagtgcactccagcctgggcaacagagcaagacccagtctcaggaaaaaaaaaaaatccaggacgtaactgaggaaaatgaagtggaaatgaaatgcacacttacctatagctgtgtttcctactgtcagtgaggtcagatgtttttgaccaaaaaaagatcggaaagtgaaataaaactaatggaaatggtgcacgatggctcagtggtttgcaagcaatgcagatggcctcagccattcacattcaggcaggagccgctgatcctagtgtttaccttggagctggtatccagtaatgtggcaagatgtttattgctttctcatcagatgatggatgtggaagagaatgtttttgccctggaaccaggtaggccttgggctacttaatttgctctttaatagacataggtgttcttgaagtacacctgtcattcccttaacagagcacctatgaggtgccaggtgctgagggttcgttggtgaatgaagtacattttgtggcttctaatccagtggctttggacatgtcctggtgagaggggtggaaatagtgtatgcgaatgtgtgtcaaatgcctcagaagtgggaaatggagggagagtttgaaggcctgaaggcgttccatcaaagcttccttccttgccgtctctacccttccctcaactctggctcaggcaaatgctcaaagtgactcaccctggtaggcacggaaagacaagagagacttggatgtagaaagacacatttacagtttgtggagggccgtcccttcggacacatttcatcagtgggtgtgatgctgcctgtggtatcacatgtgcagcagcagggtgttcggttttgttttttgagactgggtcttgctctgtcacccaggctgaagtgcagtggcaccatcttggctcactgcagcctccatctcttgggctcaagtgatcttcccaccccagcctcccaagtagctgggactaaacacacacaccaccatgcctgggtaatcttttgagatctcactgtattgtccaggctggtcttgaatttccgggctcaagcaagccttctgccttggcctcccaaagtgttgggattatagtgtgagccaccgtgcctggcctaacaagatgtctgtatgtgaagccacattcctggcccatccacagtcacgaggacttgggactacaggctgggtgacaaaattgagctgatttccccaaatctccaaggagatcccctctgaagagatgccgtgccgatgagagacagagcctgcaccacgaagcaaaggcaggagcttgtgagcttgtgagctgacccctctggccttggcctcttagtgtctatagcccgtcactgccttaaagccaccacatcacatgtcactgttcttcaacactgctcttatttgaatgtctcagtgataacatctcagaaatgaaaaacagggtctccacttctgaggatgtgacaagtgagttggaggcagtttcccaggggaaggatttttgtctcaaagcattaaaatagaatccgttctaagtcagaatattccttttaaagttaacttcacaaaacttctctgatcttgatcctcttgctagcagctgactgccgaggatgggttccagcgcttctcagaacaatgtcgtaggcgtattagctctgtaagtcaccacgaattcagaataataactgtggggtggggtgcgggctcactgattgactcggaggcatctagagttcattttgtaaaacacttaaacaattcagggtgttttgttttgtgggtagatttttaaaaataattttaaaaatgtaaaattgtggttaaaaaagcacaatgtaaactttaccattttaatcctttttaagagtacgggtcagcagtggtaagtatattcatactgttgtgcaacagatctccagaacttttttgttttgcgaaactgacatgctgtacccactaagcaaacaacaactccccattttctcagaccccctgagcttccagtaaccaccgttctactttctgtttctatgagtttgataacttgagacacttcagatgcgtggagtcatacagtatttctgtttttgggactgggttattttgcttagcttaatgtcctcagagttcgtccatgttgtagcatgtgacaggattccttcctttttaaggctgaataattcattgtatgtgtacaccacattttgtttatctgttcttcagttgatgggcatctgggttgttcctgtgtcttggctgttgtggatactgctgctgtgaacataggtgtgtaaatatctctccggaatcctgctttcaattcttttgaaagaattgaaagaagtgggattgccaggttttgtggtaattctattttaaattttttgagggcccaccacactcttttccacagtggtcgtgccattttatattcctaccaacagtacacaagggttccagtttccccacatccttgccaacacttgttactttctaattttatttttttttgatagtcacagtcctagtaggtgtaaaggaatatcttattatggttaaacagtgtagttttattatttatacttcaggtaaccaatacataaattagtactaataaaaattgataactactatttattgagtgcttattaagtgttctaagcatcttgcatgacttaattctcattacatctctgtgaggaagaggttccatttttacccattttatagatgaggaaattgaggcttggagaatgtaaggaactcatacaaggtcacacaacgaactgaagcctgtgcctggatttgaacccaaccgtctggctactagggtgttctctggctttcttttcctaattgactatgctctttaaaattcacatcttcagctgacccatatcaagaaagttatagaagataatgacatcctgactcctgaatggagttccttgaagtgcccaggaatgaaaacttggaataaggcccatgcctcagtcatcactgatgcctcggatagcagacttaagcgagggctttagaaatagtggcctagtctcctaagccctgggcttgtaaaatactctgtacttttttggtttgaattcccttgttaaatgaataatagaaaatgtgaggagagaggcacaacatttttttcttgacactattccactttgagtttggtttctattccaaatctgtgtgtgtgtgtggcagtggggaggaaggtgtgttgatgagttattgttgcattagaaggttcactcttagagccaccagattttctggaaagccatacatgtgctataatgcctgtcaaataaaaaatcaatgtgacacagttggtttaatttttgttaatctttatcatatttaattttgttttttgactagacctaataatgggccagaggcctttaggcactgttgaagtgactgctggccacaattccccaaatcagctgtaatgtttgtgttggattattgtattaacaaatgcttcaaattacattagaaaaaaatccgttatgttattttaagttgggggaccaattccacactcacatctggtaatcctatcagtaaataatggcacagggccattctaacagggccaattaagtctgcagggcctctcttcactctttgatatgttttgtgaacatttttcttattttggtgctatgaaatgaagtctctgtcaagagctcaagtcatagactaatcctcaaaactttttttttttttaaacaagacaaagaaaatatgagatgttgtttcctgcaacaaaatcctagagagtttgtaggatgttttatgtatggtgtgttttgaggatcgtggaactgagaaatccacaagaatttgccatccagaaaaactttccactggaggtggggaagaggggcctgcttgactccctcatgggctcaggcctacctctgcagttatgattgtggataatttagcccctcttgcaacagtgtggtacttgctactctcacctctgacttgtggatgagaatacctgcctcctgggacctctcctggatatcaagcccctggtttctgtcataagacgttcacttaacaggtgctatacctcaaaggacagatattgtcatttttgtttgctgcaggcttaattttgttcccctaaagttcatatgttgaagacctaacccccagtacctcaaaatgtcactacatgtggatatggggtcttaagagagacaaataaatgattatgaggtcattaggatgggccctaatccaatctgcctggtattcttgtaagaagagaaaatttggatgcacggaggcaccacggttgtgcacgcacagaggaaaggcctcatgggaggacacggcaagatggtggccgtctgcaggccgaagagaaaggccccaggagaaaccaaccctgcttgacaccttgatcctagacttccagcctccagaactgtgagaacgtaaaattctgttgtgaaagccacctactctgtggtattttgttatggcagcccaggcaaatcaatacatgattaaactcctctgatgcttaagtacctcacgtattaaaaaaaaatgtttacatcctgttttctctacactgtttccttggtggtttcttcttaagttgttttctggggttttccatgaggaaccaaagtctcttggtctctgctaaccttcttaccgtatgtccacatctgtcttctttctccctgccttgctgagaacctgggtctgtgatagtgggtgacatggactggagagaggggaccggatggtaacagtgtgatcagcctgctgtttcttcacaagctgattacatgcagacaggtgcatatggggcaagtgctcagggtcccgctccaccctgcatgtgctgagtatcttcctgccccctctttttttttttttttttttttttttgagacagagtctcactctgttgtcacccaggctggagtgcaatggtgagatcttggctcactgcaacctccgcctcccggttcaagcaattctcgtgcctcagcctcccgagtagctggaattgtaggcatgtaccaccacacttggctaattttttgtatttttagtagagatggggttttgccgtgttggccaggctggttttgaactcctgacctcaagtgatccacccacctcagcctcccaaagtgctgtgagctgggattgcaggcatgagccactgcaccagaccctgtcccctctcttgttctgtcctacagctccagggctgttaggcttcacctgtcatcttaataacagttgccatctctgtcactcttctccctcctgggctgggggtggggcaaatgtaagcttctccacttccccaagcatatgggtccattttattttaaaggctttattgccaatcatgactggggaatagtcagataggatcggaagtgactagattttaggggaattttaaactgtcagtggggcttaacctcaaaccactaaaaagccagaagaacaaagggatgtgtacaggaaggctggggatggtgttagcgcctcatgactgggataatctactgtggagttcacgggagggccaggccttcaaagatgcttttattgaaaacgtccctataggacctttttcactgagagtttcacatctgggttatccaacttgttgggaaagggtcttggttatttgtgcaactcttaatgatttccgagagagcctgctcaagcggatgtggggtggattcagttcaaagacttggaacacttgaattagccgttgattttaatcgtcttttgcagccgataacattaagggtttcttttatgaacctttaatacgatagtttttaggtagtgggagagaggagttgtttttgttttatatgcttttccagaagaagaagaaaggtgattcaactttgaatttcctttgatcttttcttgatcttcttaacccgttttcagaatggctaccactctacctctccagaactttcagtggctcactattgccagtcctcattcttttttcctcccatggctggtttaatttagatctccctatctggaatttgatttctttgcagcagggaccatgattcttgtttttcagttcacatggatcccagagaatagagtaacactcagcaaatacttctttttatgggagagggtgttaggtttttaaaatccttttctcataggctgttagatttgatttactgcttcgtacctgggctttctgttgaggccaaggggtaggagtgtctttgggagtgcatcagagtccgggtgaggcctgtgaccagccagtggggccccagaagctcagttagaactgcttgtacctcctggtcccctgccttcatggagtggaaagggatgaattagggactccaaatccaggtcctgggctgttctccagcccaccctaagcctggagcagcaactggtgattgggccattaactttatgtagttctggggccagactgtgtatcctataaccttggcctcagcaagaaaacattaaaggggagacctggagaaaatgtgctttgataaatagatacaaattcatcctggtgggtcatgagtggaaagaaatcattattatgtaaatcaaatagacacttaagtctggacagcaggtagctcaacgctggaagagttcacaccaaaaaaaaagaaggaaaaaaggcaggaagggaaatgatcaaaaataggggtgggttttctgggcctggggctgcctccggtcctcagtgctaccttccctcattctgcccctctgttctcttgctgtcctccttctgccccctgtggccatgggactgcccccacaggttctggggacattttctgagccccctgcacctggtacagccagcccagggctcagtgggggaagtgctccatcagtatttttttgatggtggtaaataagattcatacagctttgcagtgtttgattgtggacttttaatctggcaccccaggtgacccttaagctccttctatttttccctgtagctgtcttttgagatgcatttgctgggccttgttaatggtttgttttttcccttttgatttattagattagaagctcagttcttggcctcccccttcctgggagaagttcttgcttcatctccataaaacgttgctcttgggctttttcctgttttattacttagcattaatacctggcagcttatatctgagctctcattttattttcgtaacatataatattgcctctcctctggcagccttggtgcttgcgaagggtttagtggcctcttgtttttttacattgggaggtaagaatttagatttattagtcccagcttggcgatgagtggcacagagaattttaaatgatttgttttaagccacgtagctaatcaggggacaaaatgaaccaaggatactagaaatgaacgagcaaggaagaaggcaaatgaacttctgacttcttctaccctttgatgttttaccaacacgagacttattcgttttttagtttggtatttctctgtgaaatgagcagaaagaatgacatgagctaagagaggaacaaataggcaagggatttgtgaacacagtgctctgataatgatgacattggctctcttgaagctacatatatgtttttccccacaaagtctatcttagaagaggagttgcaaatcccttgcaagggagggttatagttggatgccaaagtggtcagtttttgacctgggtttggtgtggggtgtgtccacagagctttagctttcagtgcatctgattctgtgaaagaaataagaacggagtagtggaaatgaactattgcggtaggttggcaagtaagtctggtgacgttagggagtaaactgggaggaagttccctaggctctgatctctgtaggatcacgggtgggagggcaggtttgatctctgcccttgtgaggaggttggatggagccctttgattccatccctacctccgctagctcagcatttacagcaaacagcacctgctgttcaggacacttcattatgccttcggagtccttcaggatcttgaggatcagagggtatctaagtttttctgccttataaaaaagtggaggagcttttcagagcattctagaataagagataagactagagtctgggaacggagtagaaagatgctcaaggaaggactcctcttccttgtttccacagctgggccacaagcccaggtctcttttgcctttgactgtacaacctgctgcctgggagttcctgggagggacaggtttcagagtgtgtccttgatggacacatagtagagccctgggatccaggaagtaacaagagggcacttcccagtccctgaaagcaaacaccttaattttgctaggtaattttggggaggcaccaaacctgaaggttcaggatctgaagtactttttctccctcttaggaaatgtggcctagcatttggtggtcatgttcaaatcctggtccagtcacttactagatttctaatcttgggcaaatcgcttagctcacagatgctcatttgacctgcaaaatggccccaagccgacactctgagcaccctccttggcatttgtgattattaaattccataatgcaggtaaagtgctcagccgagagcctggtctggtatttatagtcagcctggagaaaatgaactcatgagttatggtctgcaaacggtgagctccttcaggtccacccaccagatgctgggtgaaggagtcagcctctctctagccaggcagggaggctgagagcctttgcagaaagaaagtcattggcaaatcagaagtgccatccagtaaaccctggcttcagtcactgtggaaattgttaatcagacacgtggcccttgctgattttagggtaaggcacagctgtgagcaaacagctcacctctttctctttccctagcagcacatgagtggactcctaggacaccacacgtgtgacctcaactgttctttccttatttcttcttttttacttttttttttttctaggacagtgtctcactttgtcacccaggctggagtgcagtggcatgatcatagctcactgcagcttgaactgctgggctcaagggatcttcctgtctcgacctcctgagtagctggggctacaggcctgcaccaccatgcctggctaatttttacatttttttgtaaagacctggggtgtggcggggcagtggtcttgctgtgttgccaaggctggtcttgaactcctggctttaagcgattctcctgcctcggccacccaaagtgctgggattatagatgtgagctattgtgcccagattcttctcttatttcttctaaatgcttggcttttagaacagtctaggaaaataataattggccagatgactcagttaataaagatgtacatttttcgagtacccattggttgctgtggggaaaaaaagtcatctcctcagattgctagtaatttaattggaaggaaatcagttgatttgtgagtgatgatttatctccactccctctgaaattagtcccttaacttttagccctactccccgcatctgagaaacaaggtgatccagatggagagagcaccaggtgttaaattgggtagctgatctacgttccaaggagctcatggtgcaattcagactgtcaagtgcaaactgagttaagagagacaccagcgtggggcatcatcaggaaagagttcatgaaagaattttaacaatggaaagttataaatcttcagttagaatccaagcactacggaggcccagaacccaggagaggagaattcagaggcaggcccttctactgagtcagcaagaaaagtgccatatcagcgcccctcaaatctgcacatgcataggaatcgcctggagttctggttaaagtgcagatctggattcagtagatgtggggcagagctgggattcggccttgctagcaagctcccaggtgatgctgatgctgctggcctgaggccacactttgtgtagcaaagtcttacataatatttaggttagagagtaatgtatagatgcaggtaatatgattaaaggtgctcattacaagagagaaggagctgttggtagatgggagcaatatgcccatccagacatcgtcagggtggtgcgcgacattgcctgtctctatcctaaccccagatctgctgctgcctggctgtatgacctcggacaagtcattaacaggtaatgtgattaaaggtgttagttacaagagagaaggaactgttgttagatggtaggagtatgtccattcagacattgccagggtggtgtgtggcattgcatgtctgcattctaaccccaaatctgcattctaaccccacacttcctggctatgtggcctcgggcaaatcgttaacactatcagagcctcactgcacacctgcacgttggggctggcatttaatacccaccttctaaagtgtgtgcatgtttaggaataaaagagcaaatccatgtaaatgcttagaacagctcctggcacacctcaagtagccaacaataagagtctttccattctctcacttgggagctcctcttcttactgggacttgaccagtgagaccttccgtgcctgggccctgtatcttgtgtcccctagaggccctgcaggactgggaagctggcctccgctctcctgattatgatggtgcttcctgatcttcctgggagttctggccaccaccagtgggacatcagcacgggacacagttagtacccgttcgctttctctgtggccagggattgcttcaggaactgaccagcggaagccaaggaagggctgtgaatgaatgcatgaggacttatggggagaaaaagaaaattttgtgtggagaggaaaaaaagtcatcaggcagattcctgattaaaaatggtaaaatgcttttggactcaaccttgtaattttgggctcagaaagctggtgaaatgagatgtaaaatgcctcaaaagttggacgcacccagtcaatgttagcttttctttctggctctgcagagaacattccattgagttttctccatcaagataatcattctcactctctaggtcttacctgggtgtaccccacacccccagggcagtcatcagcgccttgctgtggggagagttggtggctgggaggaagggctcctctgggcccacttcagtgcctcccatagttttgcagcggcagaaaagtcccatttctccccgactgctcatggctgaagcagccctgccttgcccagcttggtcgagctgtgttaatgtaattagctcactggcttctcaccggggtggactcaggcgcagtggcatgtgtgttaagaaaaccagatgccagactcctgactctggcactgctgagtcctgtttcttcgatgtcacctcagtggcagcaggtgggcagcccgtgctgggctagatggctgccctgggagtctgaggactctctcgggtctggtgacttcaaagtaagctgtaagtgacacatctgggtagggaggaggcctggggcacaagaggtcaaatcctacaatttagggtccctgggagtgttctcgtctagtgattcctaaaagcctgttcatggcctaggtacatttggatcttttgaggatcttgtttaaaaagcgggggctgagtgtggtgggtggtgtgcgcctgtagtcccatctactagggaggctggggtggggtgatcccttgagcccaggagttggagaccagcctgagcaacatagtgagacacccatccccctgtcttgaaaaataagcaacatctggggccccattggaggttctgatttggtttgggtggttggagtgggggagggggagccttaatcaatattttaaaaatgactcccaggtgatcctcataggcagcaaggtttggggaagccatgccagagtccagccttgcactggtgctgaatgcagaggtgcaagtctgtgattctgtcaccagagcatgtcagtgacagacctgtagccaaacccagaccttggaactcagaggctcttgttttggcttacagacacctattagactggcttctgtaatttttgcccacaaaccccagatttatgccagaaattcagcctggcagaacagcgctgttatagacaccagcagttctattctacctgggggctatttcactttcccaggggacgtttagcaatgctggagacatttttggtcattatgacttgtaaaggggtgagagttgctactggcatctggtgggtagaagccagggatactgcatggaacagcaccccccacacccccccagcagagagctaccctgcacatgatgtcagtagttcagaggctaagcaaccctattctagacgaacgtttctcagacttaactgcactcactgggtcctgatttaataggtctggggtgtggcctgagagtctgtatttctgaaaagctcctgggttatgttgacgctgcctgtctggggaccacactttgcatagcaagttattttcagagcaattgatttcagagtgactcaggagtgggttggagtcacagctgtaccatcaactagctgcttgatcttggacaagttattttaacctctgtcaccttaagtttattcatctgcaaaatggagatcatatcacttagggccaaattagataatatgtgtaaagagcttaacacaggttattggccttggcaagcattcagcaaatgtagccgttcctttcactccgttattatttgcttagcagttcagctttaattgtccattgtttcattatttacctattttgtgtctcatgctttgctataaaaaaataagatgaggtgggaggtgattgaaagcattatctctgtgatggtgagttataaagattactagcattgtttttactcctaagtcaccacaccttctgtcatggggtgggaagtgaggctggaataggacttaaaatcaactccaagagaaacattttgagaactggaggcatcaccaagtcattcttcaaattctggaaacatggtagttattctccactcactcaacaaaagtgactgtggaaggaatgtcccaaaaatcaggtgtctgatctgtgcgtttccattcaccatggttttagggaccatagagaaggatgacaagcgaacgcagataaccagtttcatcagtgtcctgaaatactcaagtcacctattgcaggagtatttcagagtgagttttgagtatgggattgagctttgttcaaagtccaacattgccacgtattagccgtgtgacctggggttatataacatcacaaagcctcagtttcctcatatctaaaatgggaacaaaatagtatctgcttctagagttgaagtgaggcagaggtgagatgatgcatgtaaattactggatgacttgaccaggatggacggtcctgcacattagaaaggctgttttcaaatgttggagtgggacaatcacttggaaacttattcagaggtccccctcagatagtcgattcattagggccaggatgaggcttggaatcaaacaggcaccctcagggattctagctgtgctgtgccactttgagaaacctagtccaggtgctaaatttacagtgatcaccttgggattctggtgtccgacagagatggaaacttcgcaggaaatgttccccaggcgggagggctaagaggacacagtaactcttgagagttgctccgacagaccttttattttggcaagggcttgtgctttctttgccaagccatcattcgttacttggctagaggagggaccacagggaggggagaggggacatatacagctggctgtcagaacagtcgacctctaaatgggataacctcagagccaggcataagcaatctggaaacaaggaggggaggtgatggaaggtgggagcagaggcaggtgctggagacattgctgcagacttcctggaaggggttgccaagccgggaagattcagaggggaagagcacagctggggagagagcccctgctggctccaggtgctggtcccagaaggcatctttggagggaagggtctgagctgtgacggttcagtgcagggacaggtggggtaagctcaggtgtgccgggctccctgtgcgtgttgcagagctcccggggagggcaaggatgtgaagtgcgagcagatggtctccgtcactgccaacctaaatcaatgactggagagggcgaatgctgccaattagcaggatatccagagctctttctcccagcccagtggccccacctgggagccaggcagcatgctttgcctcctgctgagacagatcctgcttttgctgcttccttgagagaagttttaacacatgaaaatggctaagagcaaaggctttggcaccgctgcctgctttcagattgctgcttttgctagccatgtcatcttgatcctgtttcttcccttctctgggccttggtttccccatttgtaaaatggtaatggtggcaatagtactcatcagttattgccaccacaatgctgcccagcaaactacctcagtagcacacagtagtaagtgtttgttgttcacacatctgggctggccagagggctttgctggtcttggctggccttgctcatgtctggatggctttggctgaggggaatgactgagatgatttgtctcagcttcctgtatctctctcatcctcctctagtggtgtagcccaggcaaattctcatggatctggcaaaggtacaagagccagtgagccactcatgtaactgcttttaagttcttttctcacccgccccccaccatgtttgctgccatcccattggccacagcaagtcacatggccgagcccagcatcaaggctcctggcagactgcacttcccaggatggcactgcagagtcacagtgccaaggtgtatggaattggggtgttttttgcaatctaccatgagtactaacctcacagtttcgtatgcaagcaaatcctcatccacttaccagtcttaggacagaggatcctcactggtctcctcgaccttgagacacccagattaggaattcttttctcctctgacttcttgtagttccctccatatactgttctattacccccgtccatgacacctttgtactgctgttccttctgcctgtaatgcctaccccttggcttacccatctgatcaactcagctctggggtcagactgtttgggtttaaagctggttcatgtcatttatttaaagcttcatgaccctggcaagtttctcaccctctctgggcttcaggtgcttcctctgtaaagtaagtatcgtaaccttcttccttctctgccagggttgtcgtgtggattaaataagaattgtaaagcacgtatcagtgactacaaaaaacaaaaaggaaatgctcaatagatgtttgcttttgtaaagcagagtttacattttccctgttgctgttgaagcaagggtgtgcatcatatccaataactgggaaaaacaaagcaaaataaacctttttaaccttgagatgtgtcagaaataacagggtcactctgtctcattctggtcccctgaataaaggaaatcttgaccattttccataagcctggattatccaaccatcagctttatccttaacttggcaatgatgatatgattgcttcttgtggttatgatcatatatgagaaatgtggcagcagcagaggtaattatctcttgtgattatttatgtggtgtgacagtctttcttatagctggtccccctgaacctctttgcaagtaagattttttctttcttaaatgcttttctcttccttctatgtgttgctgctactgttactcctgctgtttctaccactaccacaacaaccaccactgccgcgccaccaccaccatcactaccaccactaccaccatcatcaccaccatcaccccagctcaaccagaatgactataatccttcacacccctgccaggttatcttccctatgatgactttcttaaccagcttcccccaaacaagtagtaacattttccccacccaaatccatcttgaattgtgggaaggatcctgtgggaggtcattgaaccatgggggcaggtctttcctgtgctgttcttgtgatagtgagtaagtcttatgagatctgatggttctataagggggagtttccctgcccaatctctctctttgcctgctgccatccatgtaagatgtcacttgctcctctttgccttccaccatgattgtgaggtttccccagccatgtggaactataagctcatgaaatctctttcttttgtaaattgcccagtcttgggtatgtctttatcagcagtgtgaaaagggactaagacagcattctattattttgtatcttgtacctgcttctgttttaacacagtgtatttgaagtacagtttttgagtctcctgttttcccctatataagggggcagaaaacatgtctctgtaccttaacatctaagagaaggatttggcatataatagatgctcaatttatacctgttgaacattgatagaggaatttcatcttactctcgtgatattcttgttctaaaaccaaaaattgcagtaaaaggcccccgcccccacaaccatggttgcagaggtgtggaatagagtagaactcatgaatgacatgagacattggaattcatggataggcatatgctagcaagcctgagatccagtggggcctctaattttgatatttataaatggactttccatattgcctgtgttatttaaggtaacatgaacttctgtaacgtaagccccaaaatcttggtgaatgaacacaagaaaaacttaatttcccactgatgtgaatagcttagagtaggtgttcttggttggggaactctcctccatttggtgtttcagggacctaggctccttccatgttgagaatcttccatctttaacacaggctttcaaggccacggtgaaggtcatctacttttttggcatctagctggaggggataaggacattgagcttactgaatcaggcccagaagaggtccccatcacttcttctcccattccactggccagaacttggtcttggggaggctgacaaatctagtcagccatgtgttcattttctgtttagtaagacctcacacatcagtgtttatgcaggagataggccaaaacatttttttttacacctctatctgtttttctactgctaaaccaatcttaaccaaaccctgcttccatttcatgcaatattggctctagactgcagccatgtgactaaaagggggcccttgaaccagaaatgggggaagggttggagactgtgagctgctgtttgcaatttatgcatgatgaagataagaatgttacttcgtgctgttcttagaacccagttcatttttagactgaatgtttatatggctgagagctgcaggaaacaccatgcccaccttgcttggtttaaagcctttgagatctatggtggctgaatgtgcttccaggagcagaatttaatgtgcagggagtgggtgactattaaattcagtgactgcagcaaaactttgctccttgctcctctttgtggaaacactgtttgtacagcatgtctttcataatcaatacaagggagacattaatgaagagaatgtcttgtttggcagacaaagccttccctttgttcggattgagatgctcagttaatttcctgggagtgtatttatgagaagttggttagtgattcttgtaagtgtatgtgagtttcttgttttttctttttttaagagaggagtcaacaacccattgtattactgtaaaatatttgatagcttgtactttgaggaatgtactcatgagagcctagtcttatagatttgggatatttatacatactttaaaatgagtaggttggaggggaactttaaatatgtatattttacttaaaaaaataaaagcccaaaaccttttgtttgaaatgaccataaatcaaagcattatgggagataaattttctagactttgtgtgtggaggaagttcattgagaaagataaggtggacaaaatgctggagaagtttgggacaacccctgggttgaatcagtctccactttcagagagtttatagcctaagttcccttccctttttcaaaaggaattttcatctgtcttgtttaataatagaatctcttcttcctcctcccagccttctcctcacctcccttcaggcaagcagggacttccttctttgcattgctcaggaaattatgtttcccacttgcgaggctggccagcaaaacttctttggaagttggagaagaggatgccagtttctgcctttctgctttctgctcatagaaggctcgtgtgatatgttatcatccagtcttgctggctttcttctgggtcttctggcttccctgagtttgaatctgcattatgttacagcaaatgcagttgacagtcagtggtatagttggagcatgcatggcccatttcatggcttttttagtatgctgaatgttatgccacctcggctaggtcatgaaatcgtttaaacaaaataatgctttggaactgaaatgttctggttggtgagttttctggtcaatggaagggaatgaccttgggcagagtctgtgaccacaagtgaattatctatccttgcagagcctcagtttcttcacttggagactaggcacactatcactttccttattagggctgctgagagaatgtagctgaggttccttggctacttagcaaatgcaggactcagtaatggtaaccacagtcatctctgggtatccatgggggattggttccaggacccctctcaaataccaaaatccaaggaagctcaagtcaatgctatgaaatggtatagtatttgcatatagcctacacacatcctcccatatactttaagtcatctccagatcacttataatattaataactaatataatgtaaatgctatgtgagtagttgttccactgtatttttttatttgtattttaaaattgttatattttttcccctacatattttcagtctgtggttgatttaatctgtagatgcagaacctgaagttatagaagactgaatgtactattaataattattaagatatacaaaatcactgttagtgagagatttaaaaacatccagggtagaaagaaaatgaaatagactatcagaagcagtaattttctggtatgattttaattagtagcgctctacaggatcctttgtggaggcaaatgcattctagttagtagtatctgtgatatcatttagggctcctgttttatagattcagttccacaaatatttattatcgagtgcctgtgttatgtcaggtgctgtgctaggaactgttcagttaaataggtagtacagttaagagaataagtcagggtgttctccctcccaggccttagagttggggtgattgtgtgtcccagttttccctggacaatcctgtttactgctcttgtcctagcataattattcacagtgccccttttattttaagtgtcctggtttgggaaactaattatagggtcatcaatataggctattattgaggtagagggagtttctccagaaaaggactatggaagttctctaaacaagaaggagcatgatgaaaagtattttttagggagttgaattcaggctagatggtaggaccagtgaagaggtgggagaggggaaagcattttggagatagagtaaaccaaatactaccaatgtgatggacagaacccaactggaggtgccatctggaattccagagtgtgaagagcagcctcaggtgcgcagcctttttaggtttcaccaatcagcatatctcagatgttttcttggagactccattaggctttaacaattgccttaaaaattccccagcaaaagcattgtgggaatagggaacaactccaggttgcacatgagatgcttagctaggtcattggtttgtatggccatttccctcctgagtctaggtatgcaggtcttgaggggtggagctcaaggctacttttgcatttctgccagtgcttccaaatgtcatgactggggggggggggggttgggggtggggagggagggagaggtgggccagggtagtacccttccttgacttagtgtttgaaacttgaaacacagaaacttagtgtttctgtgccatgtctcacatacacagagagaatactggttgcaataatttcagagacagttaaaaggtgatattttctatattcagagattattaaattcgttagcaagaggaatgcagttcagacttctcagatttgggaggtaaatctcccccacccccagtgtttgcatttggtttgagtgtcttaattaccattccagaacgtttgtgaaattaaggtggaaaaaagaattctggcttaggtactaacatataacctttgtgtgtttattatgaagccttcatctttaagattctcgtttgcaatcctgggcaacacaaccaattttctgtgtcattaactttttcctgtaacaccaaagggcaggaggatgctggtctccaccttttctttctccaaggcaagttgaacgaccatctgtgccataagatggatgaggcccagtgatcctcttgttgatttggtatttgtgtcttcccacaagaatctttgctgattccaatgctcgattcactggaatactccctgctgttctctgaattgatgatggattagttgaggtctttgtattcattattggcaaggtttcgagacagtcccttaagtgcaggaagaattctggcagtggcgtcagaaggccaaggctcggcaaccttggataagtcactgtctgagtctgtttgtgttgctataaaggaatacctgaggctgagtcatttttaaagaagagagggttagagctgggcgagtgctgtgggcttagcaggggctgcagggcagtgggagtgcagacttaaaaaatgcagacccccggggcactactcatttctctagctctggtttactgtggtaccaggggtctaatcaggcctgtgtctgcctccttcttgaatagcccagagaattcatctaaacagccttcctacagcagttccctactccaggtggccacataggagttccagaccagtgttgtctccggggacattgacacagcagccaagtttattggtgttggggcagccacagttggtgtgggtggttcaggggctggcattggagcggtgtttggcagcctgatcattggctgtgccagaaacctgtctctcaagcagcagctcttcttctatgccattctgggctttgccctgtctgaggtcatggggctcttctgtttgatggttgccttcctcatcctcttcaccatgtgagactctgtgggggtcacctgcctgtccctgctgctacgactccataccattactggtgctgggatgtgctaagctttacaacatttctctaaaaaaaagaaaaaagaaatagaggtttacttggctcacggttctgcaggctgtacacgaagtatgacgtcagtgtctgctcttggtgagggcttcaggaagcttccactcaggattgaaggcaaagaaaaactggcttatcacatggtgagggagggagcaagagagagaggggaggaaggtaccaggctcttcttaacgatcagctcttgtgggaactaacagagcgacaagtcactcgttaccccaggatggcaaggtctgcccccatgacacactaggccccatgtccaacattggtgatcacattttaacatgagatttggaggggacaaatatctgaactatatcaatgagtcactttgtgcctcagtttcctcagcggtaaactggggtaaagaaggatatgaagaaccaatctgttagggtcgttctgaggatgaatgagatggccattgtgaaaggactctgggtcgttttaatgtggtgtcgtattattggatgaagcatctaagttcatgactgaatctagcccgtctcccgcttttgtatagcctgtgagctaagaattgtttttacatcttaaaatggttgggaaaaaaaaatcaaaagaagaacaatatttcttgacacatgaaaagtctatgaaattcagatttcaatgtccttaaataaagtttcgctggaactcagccatgctcccttgttggcgtactttctgtgccacttttgtgcgataatggcagagttgaatagttgctccagagactgaataggcctgtgaagctgaaggcacttatctggccctttacaggaaaaaatgtgccagcccctgatgtaggacagtggttattgttcatcttgtagcaaggtgaatcgcgttctacacagaggtctttccctccgatggtgttaaagcttggggaaagctaaggctctcaaatttctgaggaagaaatcaaagctagtttgttttttcattcattcattcattcattcattgtttcaccaaatattctttgagttcctgctgtgtgccagacactgttaggggtggtaaggaaaatgcagtgacacaggagaaaatgcctgccctcctggagcttacagtctagggggaggagtaagataatacacaaataaaaactcctgacccgcctgagggtgatggatgatatggaagggcagggggagagagtggggactattaggaaaggccatactgagaaggccataggtgatgtgaaggaggtggggtgtgagccctgaacctacatgatggggctggggcagcggggagtctgcttaggcagagggcgaagcaagttcaaaagccttggggtgcaagcattggagatggtcaaaggagagcaatgtgcatagagcatttttgtgtgtattttaatttcagcattggctacagagctgtggtaatctgatatgtgatcctgttttaaaaaaattattttatcttcagaacaataggaaacacgaagggagaccatgtagtgcagtggttaagagaaggagttccaggcagataagagttgaagctcaaccttggcagtattgacatttagggctgaacaaaatctttgttgctggaagctgtcctgtgcaatggaggcagtttagtagcattcctggcctttactcactagatacttgttgtgataaccaaaaatgtctccaaacaatgtcatatgtcccctaggggcaaaattggggcaaatgttagttgagagagcagagaccctgactctttttgtctcctgttcaccttttcttcagcagagagcacggtgtctgttcatatcctggtgagaagtatacgatttatgtgattggctcagatccttgtgttaaaatacaagctactaaaatggtcatctttgcaattttttcattgcctttttttctcttgctagtcatcatcccttatgtgaagcaatgaggtggatatcatttcctccatccacttttaggcgtggttggaattggagggcttaaggcttacgaaaagtgcctgagcccctgagtccatgcttttggcccatctgaactccaggaggggagacatacagataaaagagtgaggtgcttttatagtgttcctctgaggctccctggtaacatgccatccattgaaaattggcctctttgcctgggggagcccctaggatgagttgatacctaagtcaccactgggcatgctgaattaaaggcatgccttgctgtaaagaggaacggaagctcagggcaccaagcagaaggggcacattaggagagcctagcagaaatgtatttttgaatttgtgtgccctgttgggctcatttggattgatttcctccactctaccttctatcctatgcctaagttgatcatggagcaaaatgttcctgtttgttcttccttctagagttacgaatggtaaaaaggcaataactgatgtttactgagcacttcttatgtgctctaagctctcttcatgcattctctttccccccttccaaatcctctccatcatagctgttactgccacttaaagatgaaggaagagccttgagaggtttagtaacattcccaggctgagtggttaagtaactgggggaagctggaatttgatctctgcagccttttttgtctgtaaaatcttgggtgcactgtaagagaagcccaagaattgtccagcgaaattaaaactgcaccccaaagttcagcgcctgggctccatcctcagagccttttattgcacccgcgcttggatgggtgtcttgaagccgatttaatcctggtctgtctacacaggggagcagcaagctgttgacagcctcattttatggtcatcagtgccctcttccttctgaagcttgtcaattttaatgtctggagaaccagggggtggtgtaggggcttccagacccctgtttgcaatcatcacttgtacaccagagcttctcacacttagatgcatgtggaattccctggggttggagttaagttgcaggttgtgattccataggcctggcctggggtctgatcctgcatttgtaaccagctcccgggtgatgatgtggaggtgggtgtcctctggccacactgaagtccctagttctagatgccatcaccctcaccctacttcagaggctgtaccaaattcttagaagagaaattttgcctcaaaagcgacctgggaacctgacctcaggaagaatttcatctctgtgggaatgtggaatcggagtgatagaggtgaatgacaaggatgtggtgttccttaagctgactcctgatgagcttggcgaaatgaagccagacattttataattggtcccttttctttgtgtagtgtctaacactttttgaatacctactgcatgtcagtgccttttcccactgaggatcgtactggataactttggatctaaggtcgctttggcagtgagaagttcccgcctctgagtcaagaccacctttgagtccagaaatggtggctcacgcctgtaatcccagcactttaggaagctgaggtgggagcttggcccaggagctcaagaccagcctgggcaacatagtgagacccttacttgacaaaaaaataaaaaaattagccaggcgcagtggcacgtgcctgtagtccccgctacgtgggaggctgaggcgggaggattgcttgagcccaggagttcaagactgcagtgagccatgattgtgccactgcacttcagcctgggtgagagagcgagaccctgtctcaaaaaaataaacataaaaataaagaccacctttgagttagcaagtatgacaggagcgcgtgagtaggaaggagggaagattcggatgatacacatgttatcatgctgtatttccttcactaattatatgggctcggtaagggatattcagaggttgtcagttgcctttgtgccagattcagttggactctgataaagacctaggcaaatacgatgtctgtgcaccgtgttctgggaagcactttgaaggaccccgggcagattcactggcatagttaatacaccccggactttccctcgccctgcatatggtggcttatgagaagaaagcgaagactagaaaatcatttgtgtgtcactttgcaggaaaaacacttcaggtaatgagacaggatttgagtgggaaggtgattataaccaacccttcattcattttctacaaaatagtcaacatgcagtcttccaagctgcataatgaatatagcatcctttagctggggatgttgggaggatttattttttatctgtgatccaatattaatttgccttaaacaaaagaagcaatttactgtgtaattctgaggtttatggtgtttctactaagtcctttcatctttgaaagatggtgttatgcattttaatagaaaccatttttttcttaaaatcttttctttttctttttttctttctttttttttttttttaactctttcttctcttcagtcggattatagagttggagcaaatgtcatgatgaactttgaggcctaggcctggactcttgaggtgtgtgtgtgtgtgtgtgtgtgtgtgtgtgtgtttctttctccataatagtcccaaccctaaacaggggtatggcacagtacttcttatgaacaaaagtgctattggtctacaaggggacttgagcctgcactaattgtatttgattaggatttttgtgctgtctgtatgatgtttaaccacactgtcaattacagacttcctttaaggaatttccaggaaacccccttaccataagagtttaaattaatagtttgctagtttaatgacagcagttggtaaaggaagcacctttcagaccattagctaaagccaacttcctttaaacttaaaggagggcacagcatgatagatggagatctgccccagtgcgtcatcataaatgcctcgaggcagccacaggatgggttttgacctcagtggggataggtttggttagagggttgggtagaaccccctaacctgtagaagaatctagaaaagtgagatgaacgcctttctcttaaggctgtcacttgtccaattccaactccctctttagtaaccacctccctgcctcccagcgaagtgaccccagggagccggttattatggccctgcttgatggataattactggttgaggcttgatttgacaccagcattttgcatgatagcctgttagatttgcttggctcagattgatattttcattcctctaaggctgcagcatggaaacatggttgagtggggtttgccaagatgggatgatttcctgtgctgtggcaggaccaggacagctgttctgagaactgtttcggcaaagccttcacagttggttttgttgaaggcttttctgcaggtgcagggttggttcctaaaggacagtagtctggttttcctaggaaactacttatggagagtgcgtgtgtttaatttaggaggcacagctgtgcaagggactgggactccatcagggaacggggtgcaggagctccatgttccttatgtcttagcttcattcctagttgctggcgtcggaactgatcaaagttgtctgttgtctttctgcacacccatgctacaggcagtaagggatgaggcagcaaaaccagttcactgctcatcagctggggaggcttcaggacagtctctgaactactgagcattagtttctttatctgtccaatgggcccaatggcacctgctctgctcatctctcaggatcttacatgccacataagctaatggagaagtaaatgctttataagcctaaaggaatggacatgggtgcattcagtgagaggcagtaggactaatggttagtgattagtttgctaagtaggagcagcagttgttagtgtaagaagggcgggttagtacatgggtggtggtcaggaggagcaccactgctgctgctacttagccacttgtgtaacctttttttttaaacaaaacaaaacaaaaaaaaacaaacctctcagtctgctataggatagattgttccagcatctgaaattgcaaagcacttcttgaaggggattcttaggatggcgtaattttgttcactcataggatcttcttcctggggcatgatcctagccatgttcaggataagccctgagcatcaagctggtgcagtgaagtgttctgtggctggaggctaaatctgtcccaggctcacagcatgggagcggggatggcaggggcttttgaattcccttgagggcacttggcctttgcttgtatctgctcaggaagtcagacagtctgcagccagtggcgtgtgcagccaccccttctgttctctgaccctggaggcttgtggtccatttgttttaaaggtgactgtctgatattcctttggaatacgtgagtccggtgggaaagaatagaacatattctgaatcttaatggtggatttaaaaaatctatttagagaatctgagcacttaattagacatgtctttttttccccagctgccctaattaaatagtaatcataataaggataaggataatagttgatctcagtatcctgtctcccagtgaagttgctcaatacatatttgtagatgaatgacttggagatccaaaggaaggttcagagatttgccattgtattcgagtctaccctggtgggacctttaaggtgaacattcttcttctctgggcctccaccttttcccttcccatataactattttctccttatctgcatgcttttctgcaatgcatatccgcaacaggtgagcctgggtgaatatgattacatgcaggttggtttttctcccttctttgtggtccgcgttttgggattaaatccccctgcagacttttgtctggtcagcctggttgtgactgtggatcttggtttcgtatactgtcagagatggcaaggaattcaaagatgatgtcgttttacgtctttattttataaactcgggcccaaagtgaaatgacttgcccaagaatacactgagtgagtgaggtggtcatagagagctagctctcctgacgcttagctcagacctaattccaggaaggtgactgcatctagcttctgccccaacacatcctgggaagaaatggtatcctgctaagagaatgagggctggatggaggtgtcctgcgtaacggtgtcaaagtacttcactctgtcctctggggatcccacagtgattctttgattctatgcccactgaggaaaagttgatttgagtctactccactgtttgattgaaatgggcctcttctgtccccagcctggtgagtcgtatcttgtttccctgccagtgggcattttctgcctttatccccgctcatggctgctgaatgggtcacccaggctggggcaggctgaactacaggctaatgaaattgtttggcctagttcctgcttggtggtgaaatctcagacaggatcttatcaccctctctgtgcccggaaaattcgactctcctggagcttataaaattgggatgtctgtttccactagcatttctttcccagttatattaatcaataatgtgaaattaaatcaagaaattccttatgccggcactggcttctccaatacatttatctctgtattctagtatttgctttggctctttttctcagaaggggatttttccacacaatttaggagcacagagcgaacttcctgggaaagcctagaaattcaaacatccttagctgcataaacttgggagtatcagtatatctcactgagccgtgttatttttaatctgtaaaatgggcatcagtgtgccacccttgcagatgttgtaaggattacatgagattgtatggtgtgtaggatacacctcacttcgtgtttggcatttagtgggtcttcatgtggaggtccgagctttcaagacagccttttgcctgatgtagatgtatttacgtgtattggtgtagggttctcaggcaggcttgatcatcagaattacctggtgtactttaaaataatcccagcatgagcatcagataccagggttcccccagaccactcactcatccgaatctctggagatgggccctatgttccatcattttattttatttttctattttttttcaatatttttgtagacgtggcgggtggagggctggtcttgctatgttgcttgggctggtcttgaactcctggcctcaggcaatcctcctgcctcagcctcctaaagtgctggaattactggtgtgaatcactgcgcctggtcctatcgcatcattctgaaaggctccccctgtgctattttgaatcctcagccacatttggggacctctgtaggatgggttttattttttctcatcatccttgataaaggcaaaatggtggtatggtatagagacttgaggatttcaatctgatcattttttcatgcttgatttgggctctgttcacagcaagtttgttgggataggtggggtaggaaagggggacaatttaaaaataatcgtctaataagagaagctgtgatgcttgactaattagaaatggagaatttgcttcttaaaaaggcaatcttcatagtactaaagacaaccagattatatctgttcaggccaccatagggtttgccttcagatgcagaaacttatctctgagatggctttaagatggagtggtgagagtccacattgagtttcctatctgtttccagatgtgtgggtggggtttcttgtctctgtctctgtccctcctcctctggctggcttaatactgggagaattcttttcgcttcctggaggacccacatgctttggagtgagggaagccaacttgaattctggctccaatccttaaatcccatctggaagtgtcatatagatgggatctgttcccagcttggaatctacctgggtataacctggcactcaacgtgtggcctcagatgtttttgttgagcaaagagaaatatatcagagaaagatgaaaaaaaccccaaatcaggaaatctgtccatttccacttcctgattctgtgaccttcagcaagtcattgaaccttagagagtgagccttggttcccttatttgtgaaatggagtgctcacattcctttccttagctttctcaagtgaaataatattttatgtaaaaatgcttttgtaaaaccgcagagcagcctcacccttactgtaaaaggaatattttgttgcttgttagaacactggcatttactcagcatttttgctggttgtttacctgttatctctctctgtgttaaacatggaaaattatttgtttataagttttctttctgctttttagtcttctgggaaccctgcagtgcctaggcactttgaggaagggttttctggaatttcacatgggtttcacctcaccctatccacatagcttgtctttagaagtccctatctccctgtgttttctggggtgaaagacagaagctctgatctgcaacctcaaagctgcagtgttcaggaaagccagatatttttgttttctttctttcttttttttttttttttttgcctctcaattggagtcatatagtgctgcagcaagacttgttttctggattagttactgacccaaagtatttttcttgcgaataaatgttgcttcccaccacagtgactcgagaataggaaggacacatggagaggattataaataggttttggtgccaacagatagggcagccttccagaaaaattatttgcattcaccatgtgtttgttaaatgggcaattatggagtgtacagttgctagcatttgtttgcctctccttgggaaggcgatagttcagtagtggcctgcatttgacccttagtcagagagctagtgggctttgcagctagttcattcatttgtcctaatccaggatggactgtttaaaaatatatatccagccagaaaacagacatagacacgtatagggaatgagttcttgacagagaatttcagtatttaaccattggtataagcatccttccatccatccattcatctacttatccaccttaccatccattttccatccctccttccattcatccatccactcacctactcttctacccatccactcatccatccgtccgtccatccattcatccacccatccatccatccatccatccacccatccatccatccatcctccattttggcaaatggttatcaagcacctactgggtgccagttctgtcctgggttttggggatgaaaagtcaaataagacaggatctctgacctcaaggagcctacagtctgcggtacaggatgttttcctaaattttaagtcaaattcttccttgacacatacctatttttattttgttttggttctcatctctgtgaacagagcaaagcatgcaaccattgtaacactttcatttgtttttataaactcaagttctagagttggatttcatgatttgcataactcggcatagtgtaagtgcttgtagttttaaacagaaaaagagggaagaaatgacaatccagaaaaaagatcaaatcttatgactgtaatttattaaggtatccaatggaattctttccttttttctttcttttttttttttttttaagagacagtctcagttacataggctggaatgcagtatcatgatcatagttcacagcagccttcaactcctgggttcaagtgatcctagaacttgtggcctcaagcagtcctcctgcctcagcctgccaaagtgctgggattacaagcatgagccactgctcctaattcttaagagatatttttaaacctcatagtgtatactcttcagaattactttttgaaccataagtttaaatggcaaacactttctaaatgtattttactgaaaggccagttgagaagaagaggattccatcatcttttgaattagcatgaggacaggccattaaaattcatgattaagagcacaggatttaggtctgacaaacctgggtttggatttccattttgctgttctctacctgtgtgacttggggcaaattacttaatctccctgagcctcagctttcctctttataaaatgggaataacaacagtatttacctgagagaactggtattagaatgaagcgagagtaaagatttgcaaagtactcaacacaggcctgggatatagtaagtgctattttgattatttttaagggcaaagagattagatagttaacaaaaaaaggaaaaccaaatattggtcattggagggtttctgtggaaataagatatgtgatgccttttggtattacacaactaacaatctcctgagaaatcgtaaggtttctcacatagcccttatttgcatctttgctatgatgccgatttttaccaagctgttttttgcagttcaaggattggtgggaaacgtttgtatgtgttggggtgggggtgggagaagaaagagcgtcaagcctataaacaatgcttcagattttcagctaattttaacacgaattagattttaggtttttagcatgtcttttcggcagacgaccccacttagaaaatccaattctgaaattaatttcaacaaatcagaaaggctgattggtagttgtatctgactttttttcttgttgaccagtgagttgacttttatataacacttgaggcaaagagttcagtgttgtgggaattattttcacaaatggatcattttcttaaaaaaaaaaagaaaagaaaagaaaaagaaaagaagggagaatttctcttggtgtttttgttccatggaaggtagttctacatactgtttatagaggccttgatcctttttaaacttaaggagcccagttggcctctattgcaataaattgagctccatataggggctgagggacatttaatttatgtgcctgactcttttccccagttcagccggctacttcctgggatggtgttcttgattgatggcccttctggcatgttgtgctgctgggatgtcttttgaagtttctcctccgggcctgaggtttgcccctgtgaggtgttaatgggcttcctgctggggctttatttgtgaggggtgcttgttagagggggcttgatgggccagtgggggcaccagagcgccagttcttccactctgaagagttgattctcaggccctggactcgtgttctcaacccactgcaagtcttgtttttatttgtgctcctcaggtagaaatgtttagcttctgggggttccgagaaccctggcaggttttgggagtgggtgatcaggcccagccagggaagggttgctttgagaacccacacagataagtggactcctccccacaggggatggcagggatttgcggtgaataataaggggttgagtcttgagcaagatggcccataccttgtcctcttttctcccgggttggcaaggcctccgtgttctcctccctgggtcctcagcggcctgactgcctctagcctcccctcccaaattccattctcctcagcaccacacggcactctttctaaaatggctctcctcttgccagtcctttcatggtgtaacgggttgaattgtgtctccccacaaattcctaacccccaatgcctcagaatgtgactgtattcagagataaatagggcctttaaaaaggtgattaaggtaaaatggggtcattagggtggatactaatccagtctgactgatgggcacagaaaccagacctgacctgccaacaccttatcttccagcctccagaactgtgagaaaataactttgttgtttaggccacccagtctgtggtactttattttggcagcctgagtggattaatacacatggctaccttgaccgatggggtatatttccaacctcatggagtgtcacaggaggtcttttgtctctggctgctgtctgcctttctgaccttgggcagagctctcttctcttgcctgagaaactacagatcctttatgactcagttctaggctacctgctctgcgtgaggccctctgagaccatccttctctctgtctccctcccctccccaccgacgtggatcttctatactcttctgagaaccttgagggcagagacagcacctagctctgagcctggtagttaatcagtgtttattgaattagttaagacttacactttattgttttgtttccttaggaagctacccgctatgcccaacttagtgctctattagaaaagatgatgtattagtctgtttccacactgctgtaaagaactacctcagactgtgtaatttataaagaaaagaggtttaattgattcacagttctgcatggctgggagagctcaggaaacttacaatcatggcggaaggtgaaagggaagcaaggcacgtcttacatggcagcaggagagagagtaagggaggaagtaccacactttacaaccatcagatctcatgagaattcactcagtatcacgagaacagtatgggggaaaccacccccatgatccagtcacctcccaccaggttcctcccttgacacgtggggactacaagtggagatgagatttgggtggggacacagagccaaaccatatcagatgataaaccttgatttttcacagggtgttaatagcttcatacaggtatgtcccagatgatgatggttatgtccgtgataacactagtaattttagctagtatttactgagcacgttctatacaccaaacaagcatgtgcctcacctaactgtcacaacatcctttcaggtaagcgtattttcaagtaaatttgagccagctttatctgggagatggcatagcccagctgtgagcaagaagattcaaaagctaaaggcttctttgcctccagatcatttctggcagggcttgacactccaaagtgatttttcttcaggtgctcaatcacatagtaaatttcaatgaaactggcgagcaaatgaaacctcctttaactcactcttcatttgcaaacgtaggaagaaattgttcagtgacaactctgttcagtagaaccatcatgagttcactgggtccccctgcagcttggggactgggtggccagtgctgttcttccacctgccactctttagatatggaaaaagagacctggaggagttttccaagatgttgtcaggttataagaagagctagtgagtgcactagactgtgctgtttttcctttggtgttcagatagagagaattttaaattcactttttgctctaggtgctatcaaggcttttagttatttttcattttaaaaccctgggaaagaagagggatgacctggccattttcgatccaatgtacttgacagtatttccttgtgctgcagtgtccccaggactgactttgcaattctttctgagttgtgccataccactgaatccactgagggcaaccttaccttttggaagggaggtgagaagaataaagaaatgtagaaattcagtaaacacaccgctgggcaagtaggacctcagtctagtgtagagagagctggctgccatcaggaaatagctgtgtccacagctttctcattttaccttagtgctcaggcagaccctgtggaggaaatgaaatttaaatagagaggtggacaagtctctgcctgagcttccctgaggctggggaaggagatgagggcaaattgagcacctggagaccagagtaactaaggagttgtgcctacttactctttgctggagagattgttaggtctggcatacatttctgggggttattagattccttccttggtttaggtcaacttgttgtgtgacagggagacattgtattctaatctctggaatctggctgcctttttccatccctggccctgccacttactttgagagctcagacaagtggcttgactctctttgttcttttatagggctgtgtgtggattaaataagatcatgcatgtaaagtatgtagcccagtacttgttttatcaattcagctgctttgacagagaggccccaaataatgatgactttaaaaagatgtaaattgatttctccgtgatacatggtcagggtagacggcctaggactggttctgcaggttccacaatgatcagagacccagccttctatagcttgttgttttgccatcttcaatgtatgcctttcatctcctggtccaaggtggctgcttcagttcctgccatcatttctgcattccagccagtaagggaaaaggggatatggaaggcatggctctttcccttaacaacatgaccgaaaagttactcacaacactgtctcatctcactggccaaagctcaatcatgtgatcacattattcacaagtgaggcagggaaattgtagtctttagctggatgcccaactaaaaagcatgattacaggctgggtgcggtggctcatgcctgtaatcccaacactttgggaggctgaggtgggcggatcacttgaagacaggagttcaagaccagcctggccaacatagtgaaacctcatctctactaaaaatacaaaaaattagctaggcatggtggcacaagcctgtaatcccagccaattgggaggctgaggcacaagaatctcttgaaaccgggaggtggaggttgctgtgagccgagattgcgccattatagttgagcctgggagacagagtgagactctgtctcaaagcactattactgtataagaaagagaggtgggatactggggacaacttgcagtatctatccaagagttaaatgctcaataaatgttagttatcactaccaccaccaccaccatcattataatcatcatgatcatcatcatttctggtcttagcctataaattcctccacgtcctcacttcttatttgatccccttattctccattttagcccatgttagcttgtgctttgttctattgcatgatttgcctctgtccctgtcttgagacctttttatacccagaggctggcaatgtaactagagtcctacaataagctcctgtgtgatgaaaatggatcttaaagctggtgaggacattgacagtttagggagactagagcataaagtcttagcaatctacttggcagcttcattgacatactacaggaaaaggtgacggaaggaagaaaaaagtctagctatcttgaaatgtaggttaagcacttgcttcattttgttgtattctttccactcacttttgtgaacttccactgaagatgtcttgaatctccatggaattcttctcaaagcttcagcctggatatccagcctcctgactcacctttggggtttccaaaatatgataagttcaaaatctgtggccttaagaaggtggtggaagccaagtttcttttggttcagaagcactttgagtatataaatggattcgtgctgtagaccctgattcatgatttagatgtttcgcaggagcttttcaggatagagatggttcattgaaatttcacgtggatttaaggctcattaaggtgttggggaagccggatgccactctgtcagtataaatcccagtgaggctaatttagtggagctgtagccagctttcatgttttccatcagccacacttaccttcatctcttcccttctcctttctaaaatactgtatcagaaagtgacattttttttctcctaggagaagaatcgctcaaagatgatggtcttccttctttctaccatggtatttgtctttaaagattaggcgatgtggtgggtgggcatggtggctcatgcctgtaatcccaacactttgggaggctgaggtgagagggtcagtgaggccaggagtttgagaccagcctgggcaacatagtgggaccttgcctttacaaaaaatgtaaaaaattagccaggtgttgtggtccatgccggtactcccaggtacttgagaggcaagaggatcgcttgagcccaggaggttgaggctgcagtgagctatgattgtggcaacagagggagatcctgtgtccaaaaaaaaaaaaaaagagagagagagagagaaagattaagtgacatggatacaaaggatgggaaaatcctgcaaagaaagattgaagtcattgttgatttattttttctttccctcattctttcttcttttcagtccctgtgggttctccctgagatctctcttgggaattcctctcattcatttcttcccttgtgttactgttctaattcaggcccatagtatcccttgctaggactggtgcagtagtcttctggtttccttgcctcctgcctcttctccatcctgtgcatgttctcccagcactgatctggcccagtcactctctctgttacacatagtaccttcttcccattactgtcaatggcatacacccttccttggcatgggatccaagaccagaccatgactatggttgtttgctaacagtcagaatatctggcatcatggtaggcattgtttgtaaatcttttttacagtgaaggaaatggaggctagagggattaagtcacttgcccagtggctcctgctaaaaagcaatgaaaccaggattgggctctgggcagctgcactccaaaactggtgctcttaatccccacatcatgtgttggtctcatctctgtctatcctcttctcccaccgtctctttccctcacaccctggcttccagccccacgaatcggctttcatgtccctgtcttgttgccatcaacagcatgacttgaagttgcccatgtcatggtgtctgaaccttcatgtttgctgtcctctctgcctggagtgccttccctctcccttttgactggcaaagtttcactccaaggtctagttcacagcccttttgtgatgattcccacccccaccccgttataagaatgagccaaagacggtgtattggttcctaggttgtttcttcacaacagactgcacctaacagtctcaaaaacctgtaggttccaaactcaatttttaaaatatttatgagtttattacaaagaataccaaggaacagtccgatgcagaggtacatagggcaaggtgcgggaggggtgcagagcgtccatgccctctccaggcatgccatcctcccaccacctgtgtgttcaccagctcagaagctctctacaccccttcccaacctcaaatttttacacatccatttgttttaaaaatagccaaaacaagcagatttctagccattcagggcctgcctactttgcataccccacagaactatacccaccgtgtgccagccattgatgagacagagccttatggttataagacctaagactgctcactgtcccaatgatcctacaatgctcctgagctacatcatcccctacagttcccctccccaccccagacagtggcccccacacccaccataaccctctggatggtctcatgctatgagggacttccctctcatgcaaccctgtttaagtgctgttgtgtgtcactgccaaatcttttttctttttatttccttttagagataggttctcgctatgttgcccaggctggtcttgaactcctgggctcaagcaaacctcctgcctcagcctcctgagtagctggggctacaggcacgcaccaccatgtcttgcttccaaatctcttttcttgatgagctcccaattactcaaacccctataccctcaacagattccatcactctgttttataaatttccatggtattttgaacccacctccatgactgtactcatcacatcatgctatagttagttgtatacttgattatcatccctttggattcctgaccaagacttgaggaagccagggagccctgggttggaaagaataggaagaagtgtaatgaactcgtaaacatgatcaggtgttcccagcgtcatggattcctttgtggttttgtacttggccatgctttatcttggttgctggcatcaaacctgaaaacactggcattttgtgaagcacctggggaagaacttataagtttaatttcctctgagcctgaaaatatgaccaggtgaaatgtatgaagtagggatgattactaaaatggagacttttcaaggcttattttgatggttcttttgtttcctgccatctccccttaacctggacttgacaactaaaaaaatgaataaataaatcaataaataaatgagtggaaggattctccgcgtgataatgattcttctgagcacattttcttccaaactgtgctcccagaagacacttggagtcttagatggttcatggatcattatcacttgtcggggacagtggaaacgtaggagctggttgcaagtgccaatcaataagcaatgaaaagaaggcactgtgaaatggcctcagccaatggatgttcagagagacagagacaggcagcttttctggataagtctttttggctgtagctcatgtcccgttacaaaaatttccgttggattgggccgaggctgggaaattgaaggcatttatttagaatgaaactaaaatttacccccatccccaaatcctttcaatgaaattaaagttacttataatgaaagagagatcttgggttagtagagatgcattttttaatagagaaagggaaaactaaaatgtggttttcttaagcctttggcaaggttcatgttgaaataacagttctttttttccttcaacattgtcagtgtaatagtgatataaagttttatgaataaataaatgtatttagcaaaatgacatatttcagcgataaatttggtttcttagttcagaatattgctttgactaaggaaggagagtgacagaatgaatatcaaggactctacccctcatttccattttctttgacagtgtgatatgggccacaaatgaagaccttgaccctgaaaccgtctgtggtttctctagcaattctcacgacttagcctcttcctccttcttccctcagaaccgggcaaatagagcaaggacaatttcccagcaatatttttccaagttgcggttagtcacttgctgctcacggttcccatttagtgatttcgatttcaatgaactttttgcttagtgacttttgaattcgttcttatcacattacaaacacatacctgaaggttgccaggtggatggatttcagttgatcccactgagagggcaggagaggccactgtcctctttaatgtttcctcccaggaaggaaggattcatcatgtaatcctgtatcggtgctgcatggtttctggtgtgagtggtgcctggccttgaagctctgctaatctccagacggccagactgaagagcataatgcatgtgtaggctgatttcttgggagcttttgttttgattattttcatttgcatactgatttattaagcaccagaatgtaagggctagaaatctttttatttcatcttattaagaagctcaattattctttcttcgcagaagccaagtttctgattagctataccaaccccatctccattaggcaatttaagatgtgaattatacattttttaaaaagtagctaattatggtaaagcctgacacatttatatttctgtgaaacccctgtggcaaagattctggctagaagatgacatcatatggggttataaaatcactccttgtggagctgtttcttcatgttgtaagaaaacttgtaaatctgaaaagattgtacttatgccttctgatcctccttccctaggcctcacctgccctttggagtctgtgagctgagttatggtgtagggactccgtccttgatattctcatagagatgccctcgtcctcctggatttcagggtggaaggaatgggaatggtaggtcaagtctgagacattgaggtctgacgctgtcttcctgttcagatggtagcttgttttggggacctttcagcggagtgtctgtccttagtgcctcatgggctgccatgcactgggttttaactgcaaactgttttagaataatctggtcttaatgtctgggagttctaatatgtgcatcccaatgaggttcttagacctcagggccagatctcacactgactctctttgaccatgctgcattccacaggcaatgtggaatgttgcttacctcaaggaacataaaccttacattgtggaatagaggtatttgcaaatatcttctcctctcccattgccagggtggctcagtgtctgctaaaattgaatccatatgggtacaccgagcagaaggggagggcggaatgggtgggaaagtacattgcagtatttgtttgtgatgacattcatttaaccagagctaacctcggagttataaaccagggcattatttcctaaacagtatcatgtattcatttgtggcagtatagaagatttaatttatacatgtatttatgcatagacatatgaaagagatcataactctggattcaatgtgataaaaagcagattcattctagagtcccatatacagtggattgtgaagaacaatcctttttattatataacatttactttcctctaggacatctgttagttcagctgttttcaatggtgcatcagcaacatacagaggggatatgcattagaaatgagggtgagactgtaatttgataaaacatatcaattcactttgctggttttttccatacaaaaatacagacagcaaagcaggacaagtcttcttgcctggcagggacgtgaaaatgatggactgggaaagtatcttcgggatgagggctcgtaaaggctgagaaatgatgccttggagctcatgagaaatagtatttgctcaaaccctttcaagacaaactatgaccacttaatttactttaagtctggtgtttatgtcatagactcagtatttaagtctaatgaggccaacctcttcttcatatagaactgcccatgagtcgatgcccatcattgcttggtaaagacttcctactcaatgtgtggtcataggaccagcagtatcagcaccacagttgttagatgttagcagtgcagaatctcaggcctcacttgtccatatgatgtacttgtgtaaattttgcatgcctttgcttcattgttcttccacgtcatccacagcagcccatggtagcatgtctcattctcttcctttgatcgggaggagtctggatttttggatcggatcagaactgtgctcagcttggctctgcctgtcttttcattgctctgccttgcttttctcttctataaagtggagataccaacagcaacctcacagggcttttaagagaatgtttataaaacacttggcacagagcgaggcagatagaagatggtggttattactgtgatgacagtgatgtttatgtcccatctcccctggtggttgtatgttcctttgaaagagcctccctgtccagttcatctttctattcctccaggccggcttctctgtgcctggaacatgtttgatggctgaagggatagttgtgcagcactaccatctgtaccttaagatccttgatctctgaaaaattcagtttgagtcagaggcagcagtcctaataactttagctcccaggggaagcattctagaagctgttaggaaacaatttcttcactgtcaggttcaggcatgtgcatggctgccctctggttacacaccacattgcacgcaggtgtgtggaacaaaaaggggtagttgctgaaaatataccagctcaaggtttccattatcatgtcactctggaatgagatggaaagtgaagagctcaaataacaggcttcaatcatccaccaacttggggagttgtcatcttggattgggattatggttctaagatacagaagacctaaaacagcagaacctaagatggtgggctggtgctatccatagaaacagctgaccaggcaggtgcccagcattgaattagcattgaccttgagatacccagcatgtggctttccacgacattaggggggtagtggggccaagcagttaacagggtgggctctgaggtccaatgacttgggttggaatcttggccctgcttcttatcagtggaatcacaggcaagttacttaacttcaccaacccacaccactcacaagaacattagaacactggagatggatttatgccctgactggttaagttcaatagaatttttaaaaacccttttaatgtatttttaatttggaataggtttaaaattcgagaaaagttgtgaaaataatacagataatatagttttcatctgctcctcccagtacctccctgctttttttttttttttttttggagacagggtctcactctgttccctaggctggagtgcagtgatgccatcatggctcactacagcctcaaattcccgggctctggtgatcctcacacctcagcctcctgaatgaccgggaccacaggtgcgtaccaccatgcccggctaactttttacttcttggtagagatgaggtcttgctctgttgcctaggctgcttttgaactcgtgagctcaagcgatcctcccacctcagcctcccacagtgccgggattccaggcattagccacccagtgttgttaacatcttacattagtatggtacatttgtcatgactaatgaacggatattgatacattattattaactgatgaccatattttactcagattttcttagttgttacctaatgttcttttcttattccagaattccatgcaagagatcacattatgtttagttgtcatgtcttcataggcatgtggctgtggcagtttctcagacattccttatttcggtgatcttgcccattttgaggcatgttggtcaagtgttttgtaggacattcctcaattgggatttttctcatgtttttctcatgaattgactgaggtttgggaatttcaggagaaagatcagagaggtaaggatctgttctcatctcatcctatcaagggtgcatcaccctctcaacatgagttatcactgttgatgttgaccttcgtctcttggctaagtagtgttcgttgagtttttccgaggtaaaattgctctttcccactcttcccctactgtattctttgggagagagtcattatacgcagcctaaagttatggagaatgttaaagagaatatatattttttgaactttgcccatccataccttttttcaacattttctgtagcccacatcctattaaaatccacttcatttctttcctccaccagattgtaacctccttcatggaaaaagccaaggcttatttgtgtaaacaatataggttaattggccaaattacttgacatttcagatcagttcccccaattgccagtgcatattctaattcagcattataacatctggcagtgagaaacagaaatttactatctttattttgagaagtgttgatttttgagtaattgaggcctagaagttccaagcagtaataacaatgaaagctcacacttacatagcacttcttgtatttcagacacggtgtctgcattcaacatatgccaactcattgaatccacacgacaatcctataaagcagtcacacttattatcctcattttacagatgaagacactgaggccaagagagttgtcgtgcccagagaagtgttgcccaaggttacacagctggcaaattgcagagctgggcaataggattttgaaagcaaaaagttatctatatatctgctaaccgttcttccctctacccacaagcagcttgataacgcgactcttcacttttttcctgtgatagcacagagtccagactttggagcaccacagccatattgtttattcctggttccagcacttgcctgctgtgtgaccttgggcaggttacttcacttctctgtctctgcatctgaaaaatggggataataataatattggtacctccctggaggctttaataagataatgcaccacacctagtagttagtgtttgtttttgttattttttagcatttattacaaatacaactgctgtatttcctgaattaaaagtatggggacatggatgaaaaattgcaagtgtctgtatggggatacgatgaaatatttaaaatagggattgtttcctgaaagtgggatggctgaacagtgggattataacatgcttgtaagaaagatggaggagctaaattgtagaagggactgagaaagccaggacacgttaggacccttggcactgaggagggatgcagctcacacccccaaaattgtcagccacaatggcataattcatagtaaagcatacactgaaagactttggttatcttttcagacttttaatagttatctaaatacagtcgtcctttggtatccttgggggattggttccagaacctcctatggatgctaaaatctacaatgctcaagtcccttatataaaataatgtagtagtatttgttttttcttttctttagagatagggtctcactgtgttgcccaggctggtctcgaactcgtgagctcaagcagtcctcccacctcagcctcccaaagtgctgggattacaagtgtgagccaccacacccagccctaaaaaggtgtcttagtatttatttgcatataacctatgtgcctcctcccatatactttactctctagattacttaaaatacttaatacagtgcctatacatcacttcgtttgtgtgactcagtgtagcactggttgtgcagcaaattcaagttttgctttttggaactttatggaatttttttctgaatattttccatctgaggttggttgaacccatgagtgtggaacccatgaatgtggaactcatgaatatggaggctgattgtacaggacaaaaagtcataaataaaatgaatgaataaagcctactttaaaattgatatatatttaaaatttttaaaattgtaatttgggagccataaaaaagaatacaggtagtgtctcagatttaggaaaagtcattatttttagctaagaaccatcaattctagacttgttaatcttatcttcactttaatcaatagctctggcaggccactttttggggagagccatattttttgtaaaggaagactgaaagtcagaaagagtgtgtatgtgtgcaagagacaggaacctcgagctattgggccacaagggcacatccccagtgacctgaggcccctctcctgtactcctccaccctcacctgggtgatcttgtcttagattggtgcctcagcagaatcagaacgattgattacatgtcaaggaccaccagggaaacctgcagatgggtgaaaccgcagggttcagtctgggaaagccacggctccaatctctctaattacaaaattaatgagggctggaggcaaagcctccagacggcccagggtgagccagggagcattttgatgccctaaaacagctcatgtttatttcgtggtcttacctgatcgtgtgtggattgaagtgaaggggtgaggtagaaatggagcttcccctctaagattttgcttcttgagttaaggttggggtcaggtcagaaaatgctttttcatcgctagtgttttgatagcaaaagcaaagagccagtggcagaacttttcaaatgactcttagaggagatgacccagcgtccctgaggtatccaacacactagcttgtaagaataaggatcagaacatgactcgtatgtttgtattctgcagaatctctccctctctctctctctctcacacacacacacacacacacacacacacattttaaaagctttcatgtgccctgatcacgctgtgcttcttttgtgattaattgagagtctttggctttgctctggagatgcaaaaatccttgaggtgacctccacagagtgatgtaaacctacaaagtgattcatctcgtgtcagtgaagttgacatcttaaatgacagtctggcttgacatcccttttgggggtatttcttctcagagcctgcaagacccttttcatgaaacgtggtctgtgttcggtttgtatagtcatctcggtgcagctttttcttttcactataacaaaataacgatggtgttttctttttaattcctttagcttccttgcctgagtatttaggaagcaagtactcttaacattttttaaatgtctgtggtgggctagtggatattctgaaatagagttttggcatcacctctttctttcaaatccccctgttgggcataggatatttactttgaatgaatttgtctgaattttagagactctcttgctttgctccatctcatggggaaattgggaaaacaaatgagaaaaagggcagtgcaaataacttcaggtcagctaatctggaggggaaagaagtgtcttaggagtaaagatggttattagttaggcacggaggcaggtgcctgtaatcccagatactcgggaggctgagacagggaaaattgcttgaacccaggaggcggaggttgcagtgagctgagattgcgccactgcactccagcctgagagacagagcgagactccgtctcagaaagactgtcagctaccagttgctataccagaggtaataactgaatgataatacccctgcattttactttctagcaactttcatgtccactatttcatttttaacatcttggatgtgtaggaccaagttatgataagcaactaacttcatctttcctcaattgagaagagtgaggcatgcttctaaatgtagtgttgaacattgtggaggatatgctaacattttagaaataatccaatttagccactgtgggaaatggtatggcagttcccccaaaaattaaacgtagaattatcatgtggtccagaattctacttcttggatatatacccaaaagaactgaaagcagggacttgaatggatatttgtacagctatgttcatagcggcattattcacaatagccaaaaggtgaaaacaactcacgtgtccatcgagggatgaatggataaaccaaatgtaatataaacatacaatggacagctattcattcaggcttaaaatgaaagaaaattttgacacatgctacaacatgggtgaaccttgaagacatgatactaagtgaaatcagccagacacagaaggacaaatactgtgtgatccaatttcataacaatgtaaaaagcacagggtattttgggagagacacacatgaaactggtatcagtgattatgcaaaatagtctaggacctggagccccagtgtccagcacatagtgtgtgttttagaaatactaatgagtagacagttgttgcctgggtagagtggggatagtggggaagacctatttttcactgtataaaccttttagtgccttttggttttcataccatgtggcttcgttacctcttcaaaacattaaccctttagatccagtggcagtgaaggtggtaaagggagatgtaagttcccatttaggacattttaggacccccaagggttgttaccctaaagagtagttgatgattaaattaaatctctgaaccatcctcatgccgaaggggtgttgacaggggacagtggcaaccagtgtgttagtccatttgtgttgctataaagggatacctgaggctgggcaatttatagaggaaagaagtttgattggcttacagttctgcaggctgtacaagcatggcaccagcatctgctgagcttcaggtgaggcctcaggaagcttccagtcatggcagaaggtgaaggggagccggggtgtcacatggtgagagagtgagcaagagagagggggaggaggtgccagggtcttttaaacaaccagatcccatgtaaactcacagtgtgagaactcactcattaccaagaggatagcaccaagccattcttgaggtatcagcctccatgacgcaaacacctccccctaggcccacgcccaacattagacgtcacatttcaacatgagatttggaggggacaaaccatccaaactgtgtcatgcagtatttttccaggcttagtttttacattagcaggacaggcatttttggcaacatgtcatattttgtgtttccatttgctcctgataggggaggagactagtggtctcttctagctttttatgcttttaaactgttttgcagagaaatgtggtgttttcccccaaccccttcccatccttctcgtccctggactcggctcagagtcttacaggagtccaggagtataagttgagggaaattaatgcatttggttggatcctgcctgatgtactttatctatcagtggcatcatgagacctgacgacagtcactgaagtcactgtatactttttttcacctcttcctgcctcttcccttacccatctcccctgccccggtaactaacagattccttccagtcaaggagctgattattatatttttccctttacttttttggggcactgctaaagatgtatctgaagcagggcatggaggtatgcacctatagtcccagctactcgggaggccaaggcgggaggatcctaggaattcaagactagcctgggcaacatagcaagatccccatctatgcaaaaaattttaaaaaattagccgagcctggtggcatacacctgtagtcctggctactcgggaggctgaggcgggaggatggctggagcccaggagtttgaggctgcagtgagctatggttgaatcactgcactccagcctgggcaacagagagagaccctgtctgttaaaaaaaaaaaaaaaagaaagaaagaaagaaagaaagaaagaaagaaagaaagaaagacctgaaaagaactaattaacgctcatacatagaatttttgatgagaaccttctggctctaaagaaagtattggtcaactatactgtctaggctaatttcttagaaaataatgagcatagttaaggataactgagaaaatgtaaactatggagactgtatcccatgtcaaaattaaaaaattggtggattgatagggagagaggaggataagggagaaaatgtattttgccattgtagaaatcagaaatttgggccgggcacggtggcttacacctgtaatcccagcactttggcggggggatcacctgaggccaggagttcgagaccagcctggccaacatggtgaaactgtgtctctactaaaaatacaaaaattagctgggtgtcatggcagacacctgtcattccagctactcaggaggctgatgcaggagaatcagttgaacctgggaggcggaggttgcagtgagctgagatcgtgccactgcactccagcctgggtgacagagggagacttggtctaaaaaaaaaaaaaaaaagaaatcagaaatttgagcagtcaatgatgtgccctgggggtcacagtccccccaccccggagataatggatttggtgctttctttttgatttttcaaaataatactaaagtcattttcgcttccctctgaattactgcagtaaatttatatagggtggatgttggccttgccacagcaattatgtcgtttcgaagtatgccattgttttgtcctgcagctgaaaaatgggtgggtttattaggtccacagggcagcgtccttgttctgagaagagggaggcatgcaggaatggccagcattcctttttgttgggcttgtccctgtggatggcaagaatcccctggagccaggcacaaatcctgtctgagcagccctattattaccctgcagagtaaaagggagacaaagacccaaggtgaatttcgttacaaattgaaaagcaaaaaaatcaatccattcattgccttcttaaattctctgtcatgttcctccacactcagaggtttaaggaccatcagggaatggcccgtttgagggtggggagggcagggcccagccccatgagctgcctcagggcttctgcagagctggccacatgttgggctttattgacatcaggtgttgtgacccatggacttgatcaatcatttcggccttcccttgtggagcctgtccaggagaatggatgtggactgtgttctgatggaggaaaataaattgttcttggtcaggtttttgaaaataacagtccttgtctctcaggtgggcacatgcttggctgattgatggaatatctagaagccttggcttaaatatagaacaaatgatattgagctacttaatcttactatcactgtaccaggttccataaagatgatgccttggtcagctcaggctgctgtaacaaacaaaggcacgtttcttataaacaatagaaacttgtttttcacagtctggaagctgaaactctgggatccaggtggcagctagttggttgttagtgaggctctcttctgggtttgcagatggctaacttctcaccatagcctcacatggttgaggatggctggagaactctctagggtctctctctctcttgctctctgtctctctttttttaaaagcagcatctcactttgtcacccaggctagaatgcaatggtatgatctcagctcactgcaacctccaccttccgggctcaggtgatcctcccatctcagtctccgtgcccatcctctagggtctgttttataaaggcatcaatcccacttatgagggctctaccctcattacctaattacctcccacaggctccaccttctaataccagcacattggggatttcgacacacgcattcagtccataacagatgaggagccaacattgttgaatcataagtgatccatttttttttctttttatttctgattgatcaaggcttgcaaaagatttaactttcctgggttgggtagagtggctcatacctataatcccagcactttgggaggcttaggtaggaggatcacctgaggtcaggagtttgagaccagcctggtcaacataacaagaccccatctctacaaaaaaaaaaaattagccaagcatggtggtgcatgcctgtagtcccagctacatgggaggctgaggcaggagaatcgcttgagcccaggagctcaaggttgcagtgagctatgatcttgccattgcatcccaccttgggtgacagaccctgtctcaaaaaaaaaaaaaaaaaagatttaaatttcccttttaagtttttcttagctagcataataagggatagtctgagcaactcagactgcctatttagaaagctctgggttttgcttcaatatggatggaaaagggaattgaaaaagttgacacagaagggcatgcagtctcagaaagggccattgcagcacctggcgatttttttttccaggatggagaaaagttttcttgtcaggctacttcctgataggttcctgcagctgctttgatctaacttcctcttttccccactggacaaaaccaaaacaaagcaaaacaagtccagaaacaaaagagaagtggggataggaccagccacgtgtgtacccttgggcggttggtacatgctcagggcatgagcccaaacttgctgtgacaagtatggtcccaggctgtgccttttagaacagtgtcctccaaagtactagtgaagtggtactgagatttccaaagactgtctttgcagtgcaggatttctgattctgacagaaaccaaggggagaactcactttttctatttaaaaaattatcagtaataaagcactcaggtcttcgaccactcttgcaaatactgttgtttttctctagctgagtctaggaaggaatacgagtttatagtgcagtgccagtaaggttggaattttctgtgataggggagtaattgagacaggtacaaatcgtaagatcttcccgaggactggatacaggagaaagaaatgcagccccagaaagggaggtgtgcagttgcaggcagatgggccaaggagatggtctgattgccaagtggattggagcccaagtcttcaggttttcaagtgggtaattagaacaggaaggagccaaacacaggcctgctggcgccaggagccgcaagattttccgttcaggttgtgtcgtctcagagctaagatgggtgcatgcgagtacttccccggccagttaacaaatgcgagcatccagtaccgtgcccatgactgtgggtgcagggagcagagtgtaggcagatgagcaaatggggtttccatgcctgaggaacaagaagtcttaggctaagtggtgagtacctgcaaaaatgagagaatagcacaagacggcatagctgagtaatacattgcatggttttgcttccaagtgccagcatctccgagtagtgtatctgacaccagcacactctggtgtcagaatcttgggtttatattctggctactcaaactgtgtggtcctgggcaaattctttaatcttttttgggtttcaatttccatagctataaaatgagaatagttgtagtatctatctcgtgaatttattatgagaattaaattattttctctgtggattaaaaaaaaggacttttgcccctgattcttgtttttgaatacagtcttgatccccagaagtgtggcagctctcttgtacacatgatgaagagtgtgaaggggaaaagttgatatgcaaacaatggtggatgagggggtgaagctgttgggatccttgatgactgtggggtggccaaagctgacctcccaccttcagactttctgaaatcaaccactgatggctgggccttctgttacttgtaaccaaacgtatcttaattgatgcaggcttgttgccagactgtaaactcattgagggcagagccatgtcttattcacctttgggctgtcaaggacagcctaacctaatgcacggtggcacacagtaggtggtgcttagtggtttatgataggaagatgtgtggttagaaagcagggaaggaggcaaggaggcagggagaagtgatgtgctggtaaacagttaacaattagatctctggggaaaaattctgatttgtagcatttgccaatttccagggtgtaaatattcctatcatggctgatttcacgctaccagtgtgatgtgagtgagctcagtgttgggaagagatggtcacagtcagttcttgtgagttggtacaatccagccgtagctcaccactagaaggacagggaaaaagaaagggagagagaaaagggaagaaaatttattattaaaattaatagtaatcatggtaacgacactaacaatgtttaaactttattgagagcttactctgttccaggttcttccggtccctcctaatgatcttccctttgcatctcattgaccatagctgggttgcatgccctttcctagttgcaggagaggcaagaaaagtttggcaaaggaaagtggaagtgttatgtcttgcttgggccattcaggtgtcattccttagggcagggccccttgcctccctgaacgcaggcaggcaactgtcagccaaggaggaggactgtgggataagcaaccaagactatctgaaaagacaagacctttcaagtagaatggattatttttcagacaccaaagttgccttttcagcaaagtgaactaggctccttatcatcaaaattctaaaatttctcactgccttctttcatttctgtggataccactccaaatatcataaattgacctggtccttcatatagaatggttggttttctaaaccaaacagatcccaaccacggtgataaatgaggtggggagatgggaaatctatgcagcttgtcaaaatatgattgcggtaaagcgtccagaagtgaaaactggagcctcctgtgtgcagattcaccatgtttagtggggctgtgcagtcctgcatgggctggagtggggacagctgtggcagaaatgaggtggacagagtgaggtggtgggcatgtcaactgcaaagttccttcattatggatcgacatgctcctttacatatcctgctgggctagttgctcacagtggagagtctggagttattgcaattctgtggcaggcaaaatatatagaataaaagaaaatgccttaattgggaccattgttgggagaaagagggcaagaactgttctaagggatatttctgtagtcttagcatcctcttcttaatttttgcagattttatgtcctgttgtcagtttctttaaaaaacaaacaaacaaaagagattacaagtgatttatgggttccacctcctaagaggtccagtgtgggaaaacaaaggaagggaagaaatcgatgtaaggagattaataattctggtaggaggcaccacgtgatgcacaggcctaaacttcctattgaagctggttggaaggccgaggcaggaggattgcttgagcccaggagtttgagactgctctgagcaacatagagagagccccgccactcaaaaaataacaaaaattagtcaggtgtggtggtgcgtgcctgtagtcccagctactcgggaggctgaggtgggagaatctcttgagcctgggaggtggaggctgcagtgagctgtgatctcactattgcattccagcctgggcgacagagtgagacctcatctccaaaaaaaagatgactaatttggaagacatggaccctgttttgaaacgatgactcacttcagctagaggagaagcctggtggcacccaggtgaaaagaggccactcattatttctcagctggctgtaaattgcaccgggagtcagaatcgatacctacctgacctctttgggctgttggtaaaactagaggcaccccttgtggctgtgccgagttgatgtccagaagaacactggttggaggcgaccgttctttttaggctttccagtctagagcttacgacccccagtgcaggagtagcttggttctttgttgtctgatagtgtttcctgggtcagctggcatttcccccatgtggtctgacctcctgtgttataaaggcaaaactactttaagttagagatcagcatctggatattcagtcatcagccaaatattttgatctttctctgagcagaatggaaaatgtcctgctttgaaaaccttgccttgttcctcgaaggcaggggttggcaaactttgtttttaaagagccaagcagtaaactttgggttttgcagaccatacagtctgtcacaacttttcagttgtgcagttgtagagtgaaagcatccataggcaataagtacacaaatgagtgtggctgtcacccaataacactgtttacaaaaacaagcagtgggaaggatttggcccacatgcctttgtttgccaaccatgattctaaggggtcttggatggaatggaaacctctgtcttgcccatatgggtcctaatgcattttaaaagtcagtgtgctgtttggctaagagacacttcctcacctgaaatcacagtgaagagcaaaaagggacagcgaactccttcttattccactggtgctcaaggggtaaaagaggaagaagatgtcgttgggccactttatgtaagtatatatactagggtggtgcaggctttgaacttctcactcagtgatgtccacgtcttttgtgttagccggctggctaaagtttaactttcccctaggacttcactaaatcctcacgtctgtaattttttttttcctctttctaatagcctggataaagaggaaaataaggtgagtgctgatggtccgtacttgagacacactacagcttatttcttagcacttttcaggctttgggctatttcaaaggcgacctactctgtcatgttgaagtgtgggttgggattcacttgcatatcctcccagactggggatggctctattaagaaaggaaagcagtttccaattttacaaatgtgacgatttccccagcagactttcgacaggaaaaattaataggcaactgcatgttgcctcaatctattttcacattaagacccagaaggaggtgtggggtcaagctgacacctcttagatcggcacaccagggtgagggcctccaaacgctgacagcatcattccaccaggtagtgtgcagggaagttggctggttttcaacgtatgtcccgtgactgcttgcttttgtaagcatgtgttggctatagatggttagaaaggtcagcttcaagtgacaaaagccctggctcaagttgctagaatcacccagtttcagtccctttgaggtcttgcaagaagaaatgagataatcgccctcctcctttccgacttgcgctgtgccagtgtaacttagaagggcatcctctctgtgaaaagactggatttacatattttgctaattacagctgtcagattcctcgaagtgatttaagggtggggaggcctaacaagtgtgaagagtatttttagccaagttgtgtgggtttgatagccatttggggactagtaattgaatctaaagcttcatgtgaggccgtacggaagtggtgcgaggtggaaggagaccgaggttgggcgacgtaggtgtggggcagctgtggggtgatttgatcctggtgcgggctggtggtctctttgcctgctgtgacagctgtcagtcagcctgctttatggggtgtgaaattgacaccttctctgctgtctgggtgctggaaggggtacagttggaactggaaacttgatctgcagagcattcatttgtttattcattcaacaagcattttttgagtaaattagagtttctgaaactttcttgtacatacaggatcaccaggctgtcttgttaacatgcggatcctgttagtagatctgggatgggttgagagtctgcctttctaacaggcttttgggtgatgtcgatgctgctggtccagggaccatacctctactcagaaggcctaacactgtatgccactttggtgtgacaagatgaaacactttgagcttcctcaggatcttcctttcccatttgcccagatgttcttcctctggatcttttctgttttttgtattttttgttttttatttttctttgagacaggtcttactctgtcacccaggctgcagtgcagtggcatgatcacagctcactgtagccttgacctcctgggctcaagccatcctcccacctcagcctcctgagtagctgggactacaggcgcacaccaccacacctggctaatttttcatttttttgtagagatgaggtctcactatattgcccaggctggtctcaaactcctgggctcaagtgatcctcctaccttggcctaccacagtgctaggattacaggtgtgagccaccgcgcccagacttcctctagatctttactcggctgtcttcctttcattcctatctcagcaaaaacgtcaccacctagagaaactttgttttctcccatggcccaaatctaaagtagctcccactgcctgttttagctcttagaagacagcctctgagatgatcttgttttgtatttctctctgtctctatgagaagaggagttctgcgagaacaaagcccttgcacttgtctgtctctgtccagtgctgtttcttcctcccacccttggccgagcctagcaggatgcctagcacatagtaggtactcaaattgtgttgagaagaaggtcgcaattcctatctccaagggtcccactgactagaatgagagatggaaaagtcagtaactagttataactgtggtgttgaaaagcagtgtgagaaggagtagaccccaggctgtctgggttctaatccatgtaactctaaaatcgcttgtgcctcagttttctcattaaaatgaggtgaagtaacagtacctttcttatacatctgttgtgaggattaaatctaataaatgtaaagcctgagcaaagtacctggtatagagtggaccatcaggaaatgttagttgtgatgaagaggatgatgaagatgatgaaatggtggtggtggggatggttatggtgatagttgcagggggagagcctaacttttcagggagggcttcacatacgaagtgcactttgagctgaatttccaaaggcaagtagtaatgccttagggcagtgtcttagttaccattgctgttttattagtctgatcttacactgctataaagaactacctgagactgggtaatttatgaaacaaagaggtttaattgacctacagttccacaagctgtataggaagcatggctgggaggcctcagggaacttacaatcatggcagaaggcgaaggggaagcaagcaaatcttcacatggtgtcagcgagagagagagagagagagagagagagagagagtgagaactaggagggaagtgccacacccttaaaccatcagatcttgagagaactcactatcatgagaacagcatggggggaaatctgcccccatgatccaatcaccttccaatgttaggttcgtcccccagcattgcgaattacaattcagcatgagatttggatgggacacagagccaaaccatatcagctgcataacaaattgtcacaaatctggcagcttaaaacaacacacgtttattatatcacagtttttttgggtcaggaacatgagcacaacttagatgggccctttgccttagggtctctctctggcctcagtgaaggtatcagccagggctggggtctcatcagaaggcttgactggggaaggatccacttccaagctcacatgattgctggcaggatttgattcttgccatgttggtgtctctggtcagctcacaacaaggcagcttacttcatcaaagccatcgagagagtgatggcacaagggacgttataatcttatataatgtaatcatggaagcaatatgtcctcacctttgctgtattctattatttagaagcaagttaggctagcttatgctcaagggggaaggggcattacacaggctgtgaataccaggatttgggggttactggggttgtcttagaatctttccaccatagataacaagaggggaccgagggtttgacaggaggggcaatccaggcagagggaacagcatgtgcaagggccaagagacagggggcaccatgtcctagtgaggaaatgcccatcttgatgggcctggctgaccagtgactggcaaagtgtttgaaatgagggtaagacagggagcaaggatgcatgggctctggtgctggtattactgctcctggtgatgattcagggtatgttccttgctctgggcttccatttccccagctgcgtaaagcaagaggcatgtcctggatcaggcattttcaccctgggtaccagggaagctggggccccacagagaaatctcagggactgctggggaggatggaggaggagtgagcatcccctgcctctttgccagagcagctctgcttcgatctgtgcaatactgagatttctgtatatgattttctttctttcaacagaggcttccatgacttaaaaacaggtgaaaatgccagcactagctgccctcagagagccatcttatgctgaccgcatgtggttctcttatggttcctatgggcttgagccaggaccaaaacctaagaccctgagccagccaaccagtgatattgctttccccatccagaatgaggaaaaagggggacttgaggctgtaccggggttggtggggaggtatgttactgagttactggaaaatccagtttccgagcttgtgatctcaactatttcattcattcactcactcagttgttcatttgttcttttactcactcaatgctgtgttggcaaatggcagtcagtgttaacgtggggctttattaagtccacctccaaaatgttttgtcaatgccaagcttgtgaaataagaaactctgattctagccacatcagggaggcaggtagcagtcgaggttgtgcacaccttgtggcttgctctctagagaaagggcaccatgtcagaggccatgtctctattctctggtggaacccatggaaaagagtatctgtaggaatggtgggcagaatggggagtggagatgagtagggtaaggaagagttgacccatagaaggggaaatatatttttgtaatagggtttttactttttagatttgtgggttaaatttctgtaatctggagtgacctgagaagatacttcattcgtcttctagacaggaggcacacacctttccttttgcctctttccccatcatttcctgtcttctctgcatatttttaattttatagaagacactgttctgtgtaggactcagagaaacagctggttctctctggtttgggaactaattgccactccctagctgtgggatcttggacaagtggcccaaccaccctgaactcaggggtccaggatgggggttgggccccacaatttctaagctcctcatggccatgcctgggaggctgggttctgccagactgctgtgtccggaagcattaaaattcattgtcttccctggagccaactctaggctccattaaacagcttgtccctgaggcagctggagctggcaaggggcctgttcttaaaagcaacaggttgtgtgttggcagccgcacaaaggcagccctgggggcgtccagcccctgctgctctccgggcagggagtccaggtggatgagaaaggaaggtgtctgtcctccgggaaggaagggagagggattaccatcaggtggtgggaggggcagctctcctgaatcagaccctggaacacttgaccgaggcagctccacattttggggtctcagtggtacaggtgtggagcacatgcagggatgagctttggagggaccagaaagacccccctccgctggaaagacaaggcacaggaatagcagcagctgatgcttgtttatttttttattctgtataagttagttacatgtattatctctaacatctaagatggtgtggggccctgtgggaccccattttacagaggagaaactgaggctctgagacctcaggagacttattctaggtggttcagctggctccaaagccccccttttcccagctaagagattatatgagggctacaggaagaggatccctgtgatcctggagtttggcagggtgggtatattaggttcccagggctgccatacaaattctcattatcataaagtgggttgcttgaaacagacatttatcctctcatggttctggaggctcgaagtctgagatgaaggcttggttccttctggaggctctgaagaagaatctttcccatgtctctctcctggcttctgtggtcgttggcaatccttggtgttccctggcccgtagacacgtctctccaggctctgcctctatcctcacctgacattctgccctgtgtgttctgtcttcacactgtcttccttccatgtgtgtctctgtattcagatttccctcttcttgggctgggtgcggtggctcacgcctgtaatcccagcactttgggaggccaaggtgggcggatcacctgaggtcaggagttcgagaccagcctggccaacatggtgaaaccctgtctctaccaaaaatacaaaaattagccaggtgtggtgtcatgcacctgtagtcccagctactcaggaggctgaagcaggagaatcgcttgaacccaggaggtggaggctacagtgagctaagattgcaccattgcgctccagcctgggcaacagagcaagactctgtctcaaaaaaaaaaaaaaaaaaagatttccctcttcttgtaaggacaccagtcattggatattggattagggctcacactactccagtatgaccttatcttaacttgatgacatttgcagagaccctgtttccaaataaggtcacattcataggtactggttggttaggacctggacatttctttttcggggacaaaattcaacccacaacagtggggatgtctgtaaggcgggaatgtgcaggggcggagttgggctgaagggaagtgaactcacttctgcctctttctggttctctgggctgtgcacctgggaacagggctccttcaccgctcatcaccagctgggaacctggttgctggagaggccaggtcatgaggggcttataggccttggtaaaggctttggacctgatcctggactaggcagagccattgaaggagctgaagtggaggtgtgtatggtcagagtgcatggtgagcattgggagggggatgcaccgggcggggacaggagaaggggggcaccggcctgggtctcagataatgacggcccaggggagaggagcagggcctgaagcccagaggggagaggagggcggctggacaggaatccaggtggtcaggtgggcaggccttgctctcaaagggagagggcgggagaggagggaacatttgttgagtgaattgaaggagtctgtagcgaaggagggtggattgtccctaggaggagcaagagcatggtgggagggaaggaagtgggaagagaggcgaggaaaccagctcactccatctcactgaccgcggattcttctcccagggaaatgtgggaacgaaattaatcctgaagcttccccaggtttctgtgattctcaaccagtgtgggctggagcaatcagagaagccttcgtgggggtgtaggtctgacttgggggaaggaagtatagaggcaggaaagcaggggatgcatttcaggggtggggacaacctgtacagaggcccagggctgaagctgagtgcagttccacccagggccagagaggaccagctctgctgtgcggagaggaccttttccagccgcagcagcagcttctgtcctccagccgtggagatgtgcagttactccccctcatcaatatttcagccttgactttcacaaagcaccccctctgcctctttgcctcccccagcagcctgggtgaataaagggaagagctgacgctgtccctgctggtgggcatgccagggccagagcgggacctgtcgaagccttcgcacctgtctgtgacttgaggtagatgagacttcttgaaaccgagcccctagccctctgcctggctgtctcctaggccccttctctgtacctgtctttatgatttgttttaaggaaaagctggggagggagctcgaagtctccttattctctgaatgatgttcatctgaattgtaccaattcctgcaaattggaggcccccatttctgtaccctctccgcccctcccctcccaaagtgtacagaattaattctgttgactattgtcattctctctgttcagcagaaattcccccccccgcccccccgagacaggttctcactcttgtcccccaggctgcagtgcagtggcgcgatcttgggccactgcaacctccacctcctgggttcaagcaattctcctgccttagcctcccaagtaactgggacttcaggtgtgtgccaccacgcccagctaattttgtattttttggtagagacagggtttcaacatgttgccaaggctggtcttgaactcctgacctcaagtgatctgcccacgttggcctcccaaggtgctgggattacaggcttgagtcaccgcacctggcctagaaatttttaattctaagtcctcgggcaccaggagcatctctaatagagacttttcaaaaatgattttaggtttctatgtgggtgactgcttcctaagcaggtgagtaacaaacccatcttaatagcacagctgcattctccattggaggtgggtgcaatctgcttctggacggtaggcttctgaggcaggagtgtgtcttacaaggttgtgttcccaccgagagggaggagctgtggttccccagtatcaatcagtggggtgggaacagggacggtgttgtcttttctgtgcttccagaacaccatgggactctcctagcacttctgggcttggctacctctctaggtatcgcctctctaagctgtaaactcaaggacagggatagtattttgtttttgtttttcagttgctgtatccccagagcctagcacagtacttggcatgtagtaaatgttcaacaaattaattcatccattcacttctcaagtacttactgagcacctactatgtgccagccttcattccaggactaaggagatggcattaaagtaaacaaagtccctcccttcatggagcctccattctggtggggaagacagactgtcaacaagtgaacacggctgggcgcggtggcccatgcctgtaatcccagcactttgggaggccaaggcaggtgaatcacctaaggtcaggagttcgagaccagcctgaccaacatggtaaaaccccctctctactaaaaatacaaaaattagccgggcatggtggtgggcgcctgtaatcccagctactctggaggctgaagtgggagaatcgcttgaacctgggaggcagaggttgcagtgagccaagatcatatcattgcactccagcctgggcaacaagagtggaactccatctcaaaaaaataaaataaataaaataaaataaaataaacacatgcatggtaaataacataatttggggtaatgaagaatgccatttaagcagggctaggaaatggagtgatgaagtgggaaagctataggttggtgcaaaagtaattgtggtttttgccattttaaaagtagtggagaaaacagtaattacttttgcaccaacctaatattttggaaggtaccgttgaggaagtcttccctgaagggtggcttttgagcagagactgaagggatgggaagggtgagccatgggaatttctaagggaagagtgtttgtggcagagggaataccaaggacaaaggctcagagttggggatgagctaggcatgttagaggaatgatgaggctggattgggtgggagaggcaggcaagggttagattacatagggtcttaatagtcaaggttgggtgtttgattgattataatccaggttagtattgaccagatgcacatgaaaggcctgcaggaaaccaaattagtattgaaaaaagataaggcagttgtatgaatatggttctgttcaaccctgtttgcagtttaccttctgctcatagatagagaggcactgctttgtagttaatctaagaattcaacatggcagaggagtgggaaggtttggttgagccatgggggggttcatggtaccttctaggaattcagtctttgatggggtgaatttgatgtgtgctattcaaactcaaaaacatggatcagcaccgggaagcatcttgagataggggtgggaagagacggtcatacctcagcaggcagcattagtactttatggtactttataattgggcagcagaaaaggcacaagacttgaatttgaaagataaggtttctagttccagttcctccacttatggagtggtcttggatttgtcatttaacctctacaagcttagtttctgcaggtgatgtccttgttctgcttttccatagtgaatctgaaaaccctttgcaaactgttgctgctacatcctccattataaacccttctattagactgtgagctccttgagtatgggggctgcatttcacgcattctgggtctcttggaattagcagaatgccaaggtgctcactggatttgctgtgaatcgaattctgctgtgacattgctgtggtcagccatgtcttccggggacagagtctgcaacagaagtgtcacataacctgggagaagagtgctcaaattggagctgaaattctagctcagtgacttagaggggcttggcttagactagtcacttaacttccttatggtactttttcccatctgcgagatgagtaagataattttaccaaactcatgtgctatttgtgagtgtcagatgaagaaacatgagtgtattaggttataggactggctgctattccatggcaaccagatagcaatggctttcagaagatgggagttcatctctcactaaacagtcctgacatggcctgatgtggcgacgccatggcatcagaagcccagacccctcccatcttgttgttctgcccccacactgagggttgaccttatccatgtagcccaggatggctctccactacattcttatcccttgcagggaaagggggaacagtgacaaagggtgtcttcataatcccattggccagaactgggccatgtggtgtacttcttgttcaaaggggtttttagctggtctttattctaggtaccagcgtgcctgactcagtttctaacactatgaaagaaggcaagaccaggttttggggaacaagtgaagtctctgccacagcaaaataaaagataattctgaattttgaagtggaatgattcagggctcacccacagcttgaattggaaatgatttgattctgctggagtctaatggaaaacaacgccctgtatcttctgtattattattgtcattgaatgcttgcttggtgccagccactgcgctaagggtttcataggtgctatttctggttaatcctcacaacggtcttactgcgtaggtcccattattaggtccattttttttttttttttgagacagagtctcactcagtcgccaggctggagtgcagtggtgtgatctcggctcactgcaacctctgcctcccggattcaagcgattctcctgcctcagcctccggagtagctgggattagggagactgaggcttagggaagtcagaggagggattggaacttgggaatgctggactccagagctcataccctcaatagctcctactgcccagtctcctggttccaatctggtgtttctgctctggatatatctagtttttctgcccccaccttcctggctgggcctcgtttccagaaatgccactgacatggaggggacactagtgctctggttggtgttgttcctagcagcactgtcatccacccgaaatggaattgattcgcagaaatacgggtcaccacggaggagcctgctcatgctggtaggagagggcttaggtcccacagaggtcaagtgggcagggttaggaaaaccagctctaggtggacagatatgatttgggaattaccatttcgaagggatttagacttcctactgcctttgagggtcacctgcagctctgtaaacacagagaagatgaggccatcttccccctgcacctgagttactctggtaggaaaaagcgcagagcccgtaatagtggtcagagcctttgcttgagccttccagaaccttccctggcccagagcaaaactcaaaagtctcctcaggctaaagtgactgcactttgtcctgttggcaaattggttggtttagtgtgtttagaattcagcacccatttctcaatgatatcaaaatcattatccaacgaaaggtgatcgtatcctggtttagttgcaagattttagagctcaagggggcttaggcattattaatccaatccttatctcacagaggaccagaaagcctgcctgccgggcctgcccagggtccggtagctacgttgagttagggctgagtctttgggggccctacctgagcatgagggacaggactttgtgaattctcatataggcaacagaggtggcaattcatgacgactggacatttgtctgcctcttggcaccttctcaaagcacataatgggttaaaggggcattcttgattctccactgtgttggcttaccattttggtgcctcagtttccccatctgtgaaatgggtatggtagtaacagaactcacctcatagagggttgttgtgaagtggttttttttgttgttgttgtttgtttgtttgtttgttttagatgtagtcttgctctgttgccaaggctggagtgcagtggcatgatcttggctcactcaacctccgtccccccgggttcaagtgattctcgtgtctcagcctcccgagtagctgggattacaggcgctcactaccaagcctgactaatttttgtattttcagtagagatggttttgcctgttggccaggctggtctcgaactcctgacctcaagtgatccgcctgcctcggcctccctaagtgctgggattacaggtgtgagccactgtgctcggccattgttgagctgatggtgtctgctgtgcttagaccgtgtccagcatgagggaaacactcaaagcagtcgttgtgatcacttccatagtagcctttttcactctcgctcaaggggctgtatgctcctaagaaagcttggggatctttgtctcattcatctttgtatttcctaggtcacatcatccatcagcttaaaaacttttttgtttaccttgactatctccagtgtgccatgcatgaattcttcaacagtcataatagccttttcatccataaatgtaattttagcttgtttaatagcctcgcagaacatgaccttttccatgataaattggcaggaaataaacccatccttcttccatggggtagactgttgagatggtgggggttggtgttcttgttctggatctggtgggagtggttgtggatgtttgctcttggtggttttcagcgcacatgtaaggggctttctggggttgtatggttcgggaggggtttggagtaggctctgcttggccctggaatgggtcaggtggggagcgtttctcagtttcttataggtgctcagttgtcatttgactccacagcctgctcttagttaccctctgtgtaagtggttctggggtctggcactactaaggtgtggctggaatatgttcctgggacagttatttgagatctacgtggagacacccaggagcatcgaggatcaggtagactcagtctctgcccctaggagctctaacaaaaccctgtttccccctagtcttccccttttctgcagctccaaggatgagcaccccccagagtgggctgagacctgagcttcccaggtgggtctcctcggtgtgtcttcatagttcagcaaacacctgatgtttccctgtggggaccagcccactggggcattacagaagcccagacacactccagagtccaaacacttgggtgtagatcccactttgccactctgtggctcccagtctgggacagtgcgggaggcacatgtggaataaatctgtgttggacgaatgacaattagtgtgttgccttgggcaagtcatctcatctctcaatccctcagcttcttatctctaaagtagagatcatagtgtccacctcatggtgctcttgagagaattaaatgagatagtgcctctgaagctggaaccacagtgctcagggtttagcgggtctgcaaacaatgtaactgttggtgttatgatattattcctgtggcccctcactgcaaggctcttggagcctagttccctcccaatattaagccttgttaaatcttgcctcttttttccccaagtctgcctaaggatagaattgtccaagatgcacatcggtgatcctttgccaatgtatttgtattcgtacattttcatactgctatcaagaaatacccgagactgggtaattgataaagaaaatgagatttaatggactcacagttccacatggctggggaggcctcacaatgatggtggaaggtgaaggaggagcaaaggcacatcttacatggtggcaggcaagagagtgtgtgcaggggaactgccctttatgaaaccatgagatctcttgagatttactcactatcatgagaacagcacaggaaaaacccacccccttgattcaattacatcccaccaggtccttcttgtgacatgtggggattatgggagctacaattcaagatgagatttgggtggggacacagccaaaccacatcagtattattttccccccaataagataatttgccattcacatctagggtgactccagtggtggggactcaagggctccctggtggcgaatggtggtaggtggagaaaccagctgtatctacctctgaattcctatcctggaagggactcttgggaccacctgggcagcctccatgttttctaggatttttttttttttttttttttttttggagacagtgtctcattctgttgctcaggctggagtgcagtggcatgatcttggctcactgtaacctccacctcccaggttcaagcgattctcctgcctcagcctcccgagtagctgggactacaggtacgtgccaccatgctgggctaatttctgtatttttagtagaggcggggtttcaccatgttggccaggctggtctcgaactcctgacctcaagtgatccacctgcctcggcctcccaaagtgctgggattacaggcataaaccactgtgcctggcctctaggacttttgtaaattgtctacctgagtattaacccatggctcaggaggcccccagcactaagacgctctatcaccagtatttgaggagtcttcaggcagcggggcagggagtaagagacagaacaaatgctccaggatgaggagacccaggggatttgtgcggctccggcatcgccagcatagttgttaggaaacctgggctaattagggtgctctgttgttcttctcagcaggcccttgaaattgggcagacttctggctcacctcttagagagaaaggaacactgtgtaccactttctccctgtgtttgccacagggaaatggctatggttgctgagaagttgggacagaacctgcaggcgtgtgcttaccacgtttcttgggagagcagggatggtctgtgtggcagccacattctcactcctttgtgcttccccttttgcctccattcctaggcctgtgaatgttctagattctctggacacactcagccttctggagtatgtccaggcagcatgactgtggcatgcaaaaaacaagggcttggaagccattctctggccgtgtgatgttcatgagagttaacctgatgactctgtgcctcagtgtcactgctctaatgggaatctagaatattcttcactgagaggttttgaggctttatggtcccccataaattacttctttctctgttctttcccctaagccctatctcaaagtctattccagtccttattgtcacttgtgtgaaattctcctttctctgctctttcttctaaattgcatctagcggttggggtgggggggcggtctgcctacaaaatgaaagccactcataatggaaataattttagactcacacaggagttactgtgactcaacagctgaacaaaaacgcttggtttctcatgctgggagatagtcctccatccccacaggtcctggcagaggagcaactttgtgactttcacctgaggacctgtggggtgtgctctcagggattgtgagggtgggttctggagggatcttctcaacacagacagcctttttcctctctttgcagcagagggactcctttgaacccatgagtgtggcctttataactcaatgctcagaatgtttgaaagaataggtctttagaaagtcgaaattaccctctgttcgggaaattacaaacacctacaggtacatacacctcccatgttcccctagtgtgagtacggcagacatcactaatggatcccagcacctttctctgtgctgaacctgaatggaaccttagaatcttttccccatagtgcctgagcctgagaaaatatatacttttatagttatagaaattgagacccagagacttaagtatctagtgtaaggcagtcttcttgtaaggtgaatgaatataaatatatatacacacacatgtatatgtaaattttatgttggcaagttttgcaaattgttcctgatggaacacctcccgcccaatacatttaaatctgaggttctttatcaggaccaatttgcaaaacttgttgctgtctctaaagaatggagtacactatcacactgacaaagtagtgtatcccttacgcttgccagtttgagctgcaggaatatttgggaaaatgagctgcatgtgtcagatgggccacatcacctggagcaggcagaatgcacctgagatggaggatgactgacaagttggaacattttttgctaggcaaggaggtgcagttacaaaatatctgcctgcttcaatcagatctggcagaaaatgcaatcctttcctagagggtagagaaacatttgtttgaaatgattagtttctttttgggtagaaaggtgttccctgggtggatgttttatgaggcttatgtctgtccctctctccctgcctcttcctttatttccttttgtcctttaagatccagctcccttctccaggaatcttcccctctgctgcctgcccaaagtacctctagttccattcctgttgaaacacttaattctgtccccagtgagagcctcacagctccacctagcatgagctctcctgtgaattttttcctgtgtacctgacaatgttgagcaaggatccagggtcacacagcccatgagctgtgtgcaaagtttagaggttgccatggtctgaatgtttgtgtaccccccacaaattcaagtgttgaaacctaatccctaatgcaatagtattgggaggtgattaggtcttgagggctctgccttcatgaatggaattagtgcccttataaaagaggcctgagggagcctcttcacccctctgccatgtgaagacacagaaggcatcactgtttggtgccttgccagacaccgaatctgctattgctttgatcttggacttcccagcctccagaactgtgagcaatacattgataaattccttagtctaggatattttgttatagcagcaggagtagactaagacagagataccaagtttgtctgtggatttgtggcttcccagggcaggtgagcctggaggaaggactcgtatgtgtgttgtttttctatgccaggagtcagaggttgggctgggtcccatgatcagggctgctgtttagggccggggtcttcctgtcttctggccttgtgaatggcctggtgctttgcctggcgagaggagtcagactttcctctcttgctgcagtgtgttgttgctgctctgctgtctagcagctaccgttgccatggagcagcaagaggtactgtgccagtggcccccctcccactgtccttgcaacagctcctctgtctgcctccttagccctcagccctgccatgggatgggaacagaggagactgcagcagcaagtgtggctgattttaattgatttctgcttggtacacatttactgatgagctgtaggtcagcaacttccaacagagctgagatgggaagagaatggctggctgcctagttgcttcctgggactttgaatggcatcttggcattttacaaatgtgatcatgggagctgctgatgggacctcccctagagatacaatgacagcggcacctgtcatctctactattatctataatgtggcttgtatttatcaactcacttaaacctgcaggcagtattatctccattttacagataaggaaactaaagctcagagaggttaagtaacttgaccaaattaacacagtgaaaaaggggcagagctgggatccaatcccaggcaatatggctttatagttcatgttcttaaccactattttatactgcctctgtatttctaaactaaaagttgaaacctaccattggagatctttaaaaataaaagtaggtcattagctctttaagacagtctatgtatgtagcgacatttattaaatactgactgaataaagtacctaagagtatgccaggtactcttctagttgctctcatgtattagctcattaatccccacaacactcctgagaggtaagtattattattttcatccccattttgcagaggagaaaactgaggcatggagagggttagtatccacggtcacagagccaggatgtgacaggactggaacccaattgtctggctctagattctaaataaaagtgaaactactagcttatgaaacaaaatttgacaaacctctcaacttggttattctgacggaagaaattctaggaatagagaaccctcctggagttaccgtcttagttactagagctcagtttgtgagactccatagcttttcagaatattttatattctgaataaaaaaatgcacacaacaaaaacaaccagatacatttgttcaaaggaacgatcctcaggatttgtggacagttcacttcgagaccagtgtctcttacaatctcagttttctgtcctgagcagttaccttcaaaacttaggggaagagctcagaggatgtctgagtccattttgcatcttcatcacacagagctctgtggctgagtgcatcatagctcttaggtacagcagacctattggattgatcagcagcagaactgttatgcctggggtaagaacataatgaagtgggggagattccaagctaggaatttggggcccagattctaggggatgcctccagggttttcaggctgcaccttctccattgatctgcccagtttatggagccacaggggaataagtcctgctattgaaggtgatgttggtgcaggtggtattggggtggcaccattgaccatgctgcactgggagtccccaaccctgggctttcccttttgaggttcagtgtaggctcttgattctgcttcataatcttactttacagttggaggaagaggacgggttgcgaaaggaacttcctttgcatgcggtcagagtgctgggccatctgaacagccccctccacggtctgcaacatttctacattctgatagaaacagttagtggtcttgacgtgtctgacaacctacaaaaccaacatatcctggggtttgatctctctggtggtgtcagaggagtccaaagtgagcatctgtaagctcggctgtgatccagcctatttgggaggatctgtattaaaccagtgactgccctccccaccccacctctactcctaaagggttctgtttcacaagagccaggctcaggtacctgtttttctccacccacaccttgtttattcctcttttcctcactgtcttcgttgttgttcttgttgtatatgagaaaatcgactcatttttaacatttcgcaagcctccccctcccactagtaggtgtgtgagcagctgcagattttaccgtctgtaaaccttccacactccagcagatcctctttccacctttcagcactgtgcagcccacccaagccacgtgccttcttggtgtcccatctatgcctctctctgaaatcaggaaccaagctcactggggatgagcatggcaggacctcaggaagaagcctactcctttccttcctgcaagaaaatgtgccaggcatttagtattagggatacagaagtggatacacaagattcttgccttcaagcaactcgggaatttagaaggaatagcaacagtattaacaattgctaccatttattcagtttcagtatatgtaagccactgcactttttttttttttttgagactgagtctcgctctgtcacccaggctagagtgcagtggcgtgatctctgctcactgcagtctctccctcccaagtgcaagtgaatctcctgcctcagcctcctgagtagctgggattacaggcgcctgtcaccacacccggctattttttgtatttttagtagagacggagtttcgccatgttgaccaggctggtctcgaactcctgactgctggtgatccacccaccttggcctcccaaagtgctggaattacaggcgtgagccacctcacccagcgcactgtgcttttcctgaatgatatcatctaataattctcaaaaccagcctggaacgtaggaattcttgttttcatcttggagatgagaaaatggcagagaggataagttaatcagctgaggtcacatagctagcaggtggtggactcagtagtttgtctttggaggacagacaattttttttttttttttgagatggagttttgctcttattgcccaggctggagtgcaatggcccgatctcagcttactgcaacctctgcctcctgggttcaagcgattctcccacttcagcctcccaagtagccgggattactggcatgtgccaccatgcctggctaattttgtatttttagtagagatggggtttccccctgttggtcaggctggtcttgatctcctgacctcaggtgatccgcccgcttcggcctcccaaagtgctgggattacaggtctgagtcctgcacccggcgacagacaatattattaagaacaatgttgactgaacgcctccagcgtcccacttgtcagtgcttgtagacacaggctttcagtctcctgaagtgctgtggacactttgatcagagagggtcatggcttgtgaggatcaccacacaagaggaagtggcagctcaggtctgatgatgaagtttgtctgactccagacctttctggctcctaacccctggaccgtatcacctctcatcaaaacagtgcaagatgtattatcaaatccagccactggttagactagaaaaaggagctattaggagtggtgacagagggcatccctgtcttgtgccggttttcaaagggactgcttccagtttttgatcattcagtatgatattggctgtgggtttgtcatagatagctcttattattttgagatacgtcccatcaatacctagtttattgagagtttttagcatgaagggttgttgaattttgtcaaaggccttttctgcatctattcagataatcatgtggtttttgtcgttggttctgtttatatgctggattatgtttattgatttgcatatgttgaaccagccttgcatcccagggatgaagcccacttgatcatggtggataagctttttgatgtgctgctggattcggtttgccagtattttattgaggatttttgcatcgatgttcatcagggatattggtctaaaattctctttttttgttgtgtctctgccaggctttggtatcaggatgatgctggcctcataaaatgagttagggaggattccctctttttctattgattggaatagtttcagaaggaatggtaccagctcctccttgtacctctggtagaattcggctgtgaatccgtctggtcctggactttttttggttggtaagctattaagtattgcctcaatttcagagcctgttattggtctattcagagattcaacttcttcctggtttagtcttgggaaggtgtatgtgtcaaggaatttatccatttcttctagaatttctagtttacttgcatagaggtgtttatagtattctctgatgatagtgtgtatttctgtgggatcggtggtgatatcccctttatcattttttattgcatctatttgattcttctctcttttcttctttattagtcttggtagcagtctatcaattttgttgatctttttaaaaaaactagctcctggattcattgatcttttgaaggtttttttgtgtctctgtctccttcagttctgctctgatcttaggtatttcttgccttctgctagcttttgaatgtgtttgctcttgcttctctactttttaattgtgatgttagggtgtcagttttagatctttattgctattcaacatagtgttggaagttctggccagggcaatcaggcaggagaaggaaataaagggtattcaattaggaaaagaggaagtcaaattgtccctgtttgcagatgacatgattgtatatctagaaaaccccatcgtctcagcccaaaatctccttaagctgataggcaacttcagcaaagtctcaggatacaaaatcaatgtgcaaaaatcacaagcattcttatacaccaataacagacagagagccaaatcatgagtgaactcccattcacaattgcttcaaagagaataaaatacctaggaatccaacttacaaggatgtgaaggacctcttcaaggagaactacaaaccgctgctcaatgaaataaaagaggatacaaacaaatggaagaacattccatgctcatggataggaagaatcaatatcgtgaaaatggccatactgcccaaggtaagttatagattcagtgccatccccatcaagctaccaatgactttcttcacagaattggaaaaaactactttaaagttcatatggaaccaaaaaagagcccgcattgccaagtcaatcctaagccaaaagaacaaagctggaggcatcacgctacctgacttcaaactatactacaaggctacagtaaccaaaacagcatggtgctggtaccaaaacagagatatagaccaatggaacagaacagagccctcagaaataatgccatacatctacaactatctgatctttgacaaacctgacaaaagcaagaaatgaggaaatgattccctatttaataaatggtgctgggaaaactggctagccacatgtagaaagctaaaactggatcccttccttacaccttatacaaaaattaattcaagatggattaaagacttaaatgttagacctaaaaccataaaaaccctagaagaaaacctaggcaataccatttaggacataggcacaggcaaagacttcatgtctaaaacaccaaaagcaatgggaacagaagccaaaattgacaaatggaatctaatgaaactaaagaccttctgcacagcaaaagaaactactatcagagtgaacaggcaacctacagaatgggagaaaatttttgcaatctactcatctgacagagggctaatatccagaatctacaatgaactcaaacgaatttacaagaaaaaaacaaacaaccccgtcaacaagtgggcgaaggatatgaacagacacttctcaaaagaagacatttatgcagccaaaagacacatgaaaaaatgctcatcatcactggccatcagagaaatgcaaatcaaaaccacagtgagataccatctcacaccagttagaatggcaatcattaaaaagtccggaaacaacaggtgctggagaggatgtggagaaataggaacacttttacactgttggtgggagtgtaaactagttcaaccattgtggaagtcagtgtggcgattcctcagggatctagaactagaaataccatttgacccagccatcccattactgggtatatacccaaaggattataaatcatgctgctataaagacacatgcacacatgttaattgtggcactattcgcaataggaaagacttggagccaacccaaatgtccaacaatgatagactggattaagaaaatgtggcacatatacaccatggaatactatgcagccataaaaaatgatgagttcatgtcctttgtagggacatggatgaagctggaaaccatcattctcagcaaactatcgcaaggacaaaaaaccaaacaccgcatgttctcactcataggtgggaattgaacaatgagaacacttgaacacaggaaggggaacatcacacactggggtctgttgtggggtgggggttgggggagggatagcattaggagatatacctaatgtaaatgacgagttaatgggtgcagcacaccaacatggcacatgtatgcctatgtaacaaacctgtacattgtgcacatgtaccctaaaacttaaagtataattaaaaaaaaagaaaaaaagaaagaaaaaggaactattaaaaatgactgtagaggccgggcgtggtgactcatgcctgtaatcccaggtctttgggaggccaaggcaggtgaatcatttgagttcactagttcaagaccagcctggccaacatgatgaaaccccatctttactgaaaatacaaagaaatgagccggcgtggtggcatgcacctgcaattccagctactcaggaggctgaggcacaagaattacttgaacccaggaggcagaggttgcagtgagccgagactgtgccactgcaccccagcctgagttacagagtgagatcctgtctcaaaaaaaaaaaaagagtgtaggaccacaggcccacaggcataaactgggatgatcccagggtgacggggctttgtgtttgccctaaacaggatacacaatccagtaaacaagtattttctgagtgtctgctgtgtgccagacagtgttcttgctatgaacagaaaaggccccaggagcttgccattaagggatgcaggaggaactggggacagggatgaggccatgtcaggtggggacagtgctctgaggaagacatgaaaggtagtggcattgcagggatgagggtgccaggaaggcctctgcgagtcctctgtgataatccgggtgaagggggtcttaacttagacaactgataggcaaagaaaggcctgggagcaggaacatctgtccgtttgaaggaagtttcctgggtgtgttctgagtgagctgctgagtggccagcaggtgctgttctgtggggttgggtggagtgcaggttgcagcctggcctgcatgagccagctgtcagggtaaaggatgccgagccacagagtggtcctcttctgaaggaggctgttctgcaggcaacaggtttggaggccactgcttcgtcagaagggcccgtcctgccctttcctacttcggcagtgctcagaaattgcttatcggggtattccttggtctctgcctggggagtagaggaactcaacattgtaaataaaagggttagcttcttcaaaattcattcttgtcttctattgttagaaaccaaagctcatgcacgaatgccacccaccctgtgattacaaaccatggccctcgggtgggtgggtggcatgtgtgcatgagctttggtctctaaaatagaagtgtgagaactgttctctcttatgcctgttccctcccaagtacagtatatccatgtcaacttactcacaggcgtgatggtggttcacgttaagtattcactgtgcttctcagtggcaggagagcttttcttgccttagcctactgtgtcctcccaggaactctatgaactaagtactgtgtttattcctgctttcaagatgtggaagctgagacccagagaggtgaaacctaaggagcccaaggtcacacgcttggaagaacaggggctggaatccctgacacagtgggcctagcggaagccagggcaggtattagcaggcccattttgcagaggggaagactgaggtgcagtgatgcaaaatgtgtggtggagggctgggcctggaatctgggagttctggttccgggtgaccgtccactagaaagggaaaggtggcagaaccatatatatgagcctgttacttgttcaaggacttggtcaggggcctcacagaacttggaaaagagcaacggactcttcagagaagttcttcagagaagagctctgaactggagagcaagagctgggagcacctcccatggctgcagtctctggtcatttccaaagcccaggagaaggctgcatttggtcaaccacccacttccatttagccagggcctttaaatcattcccaaatccttaaaaatcacctggaatgtgtttaaaagggcagatttctgggcctcgagataggcctattgaatccggatctggattttgggggcctaggaatctgcattgacaccactccaggctgcgctgagggacattcacgttcctccaacattcatgttgccattaagggatggaggaggaactggggacagggatgaggccatgtcgggtggggacagtgctctgaggaagacattcagggtggtggcattgcaggggtgagggtgccaggaacattcatattggagaatccctggacctcggtactaagactccagaggggtggaaatgactgtgggttcagtctaaggctccaggtggggtgcttcaacaaaagaccatggtcactcagggccagggcaaaggttattatcagcagccccagacactttggggacgtgctggaaatatctgcctgacagagtgtttctgttttgcaccggtatgattcgtgtatctgagggctgcagcccttcattttttttttttttttttttttttttttggtatttaagaaaatggtaaaatacacataacataaaatttaccattttaaccatttttagtgtacagttcagtggcatgaagtacattcacgttgtgttcatgcagcccaaacttgagagctctttttggaacactccaggaaagaagggctgtgtacacactaggtgcttaataagtgctttcagatgacagtggggtggtgggattatcggggtggtaggctacattatcatggattaagtaagcattcccactctgtactttcttaggcaacttaacttcagtctgtaatgctgaggcagacactagtgagctacgtttaacacttcatttctatttctgggtgaagcaggatgatgagttcattgtctggtcaatgccaagggcaacttcccctgctttcctaggctcccatggcagaatagaggatatctgtgaaaaatccaaattttcctcctatgtgtgtgtcgggtaagggcagcccacagttatgactggggctccagtttcaaatgccgctgactcaagaccgatctggttgagaaccaaacaaatgggcctttttatactgaagaggagatttttcttaccacgtgtcaacaaaagatctgtagacaatcttgttatacatttcacactgctgacttcataagtacaacagcactcacgacccctttacattttttggtgtatttgggtttatttctgtggttaccatgcactgagggaagtccacaaaagccagcctgttcagggctggagcacggtgccagtggaattttggtgaacttcacagcggtagaagggagtggactgggaggtgcagaagtagtgaattttgcagccggaaggaatcttatatagactaaatccccccttatttatagatgaggatatcaagacccagcaacagggggtggttctgacctgaggtcacatcgctggttaggatctcagcccatcactgacttcctggtctccagacccattgacttgccactgctcggatcttcccagtcgttgaaccccgagttccgttgaactagatgccttgtaatataatacacctaacgataagttttcctgaattgaatattcttccgaaaatcatttatagatttggtgacttctccatttttcttttcctgcatttgggtagaatcaatctttggctctgagcagatctttctgtttgagtgtctttcctaagatctttatctttctggttgcattttcagaaccccctgcctctattgtgatgagagcgctgggtccgttggctgtctctctgggatgacagcacgagttgaaaagtggagaattgagtcatcggctttctggcgtggtttattctgtcccagaatccctaagtcctgtctgatactatttagtcactgtccttgcagtgtgaaaagtgattcacatgtaagccatggaaagcgctcagcaagctctctgagacaggaattcttgaggaggcaaaagccaacagtgttaattggagatagagagataggaattcttgaggaggctgtgaaaagccaacagtgttaattggagatagactgccatgtgagagccaaacccctcatgttctcaggtaaaagctaggaaaatgttaggctcttgtgacatgcagttgtctcagcttcaaagctggattaattaactcacgtaatgcaaaatgtttgttgagggcctattttgggcctggtcctactcaaagtagcaacaaaaagcaacttgatgctgtctttgaccagaagaagccatgagaaggtgcccaggtacttatcaaagggcttggttacatgcccctgtttccttgttacccttaagcaatgagagagagatgcttgaagaagagcagaagctctgcttgctctttaagcttggcgagggttgggtctgtttcccctcctccattcctgggctcctagtaccatgtggttgctcagtgaatatctgctctttctttttagccttcatgtgggaggcagttgttgtgtagagggaataagactagacttgggtccaatttacctgggttgaagtctttgccccaccactttgctcttgtccctggacaagtcacttgatgttgcccagcctccatttttgttgcatcaatagagtggagatgccagcgattgatcttgtgaccttgggggcatcacttaacctccctgaccttggatttctcatctttaaaatgagggacactgaagatgagtgtggagcacatgtcggaacagacaatgaaacaggcattcgttattatcattcccatgtcagaaatgggctactatcttactgttttatctcaaatgtaatttcaagagaatgatacatggtaacgtgggtaactttcatttgtcaatgtgtggatgcgccgcccctctccccggggtgtattcctcagcagcccggcaggggagggcacatccacacattgcctgctttaaatctgttgcccgctctaattgtgtagacccactacacccaaccagcttgtatcccacagatggaaggtaatttgaataactgtttaagccaaaatgtaattggagataaaagctaaatgtctaaggtctagcagtatcaagatgaccagaagtgatgcattggatcctctgctgcttctgaatcatctgggttaattaccgtactctccaccagctttggtcatcaaggagcacacagaatcattgcttataattgaagactgtggacaatgatcacataagatcatccctaagttaccagtcccttttattctaatggacatttgaagaaaaaggcctgaactttcaataaaagcgtcgtctttttgctttcaaggcccttcagctagttcattaggggattgaagccagacatcatttgtgactttccccctacatttggggaatgggggatagaatatcttttgtggtttttgtttacaagaaggaagatttcaggcttgagctggagtacgaaaggaaattgaaactaaagattgggttctggatttgactaaagtttctaatattgttcagccacaataaagccaaaagcgttcactgtatgctctggctgatatagtaaagcatgggcatttaagaaaagggttaattaggtcaattagattagatgttaggctgcctgtttctaaataccatgggatgtaatttatttcagtggagctttaagccctcatgcatggtagacatgtcgattatggataaattaaaggcaaaataaatgaatattcagtatgtcagacacaatcagagaatggtagaaaaatatgtaacttaactttcaacctctataacagctaggattgtgccccatgcaaagcttcctggaagtttgggagcccaattttttctctctacttgttgtaatttacttctaggatatagctgggccaggaggattttgtcaagaaatgggtgctcagtcttctgaggctccatacttcagttggaaggaaggggaattttcatatttcttgttttctttttttgtagagacggggtttcaagtccaggctggtcttgaactcctggcctcaagcaatcctcctgccttggcttcccaaagtgctgggattaaaagcatgagccactgcacctagcctgggttttcatatttcttataattgtctcagaactttcagttccaatacactcatcgtgaaaagcaagtgaagccttgaatattgatgtttattgagatcaggacaaagtgaaaggcaaaaatctgagtgccttttctgccttttctggtgtttttctggccctcctgttctgtcctgatttctgtccctgaactcctgaccttggacatgcaggagctacttctcccatcagccttttctgagtagaacctctgataaatggatgcttcttgcatccttatccttgaggactttggactctgatcccaagggtgttggccttcattagcttcagggtgttgacttgcattagcttctgctgggggaacaacctcaagcttggccaggtggcagatatctggaagtcttcatgacatactaatatttgttgagatattagtactatctatgtttatatatgtatatctgtgtttatgattcaagcacagctgtgtcaactgtttaacaaagttttatgggagaaagcttgataattgaggaaaatttatccctatttatttatttgaaccacaacttcttgtagtttttcagactttgagaaagctggttatgatttgatgtagtggccaaacattgtcgagtgactggaaaccgttgatttaaaggaacactgcctgggatttctggcctcagtgagggctgaggcagttatttggtgggcaggagggtggggagggtctttctgggtactgctgaagacccactacctctgtctaacctgacagagacttccccagctgttcatgacatccagggcagtgaccttggctgtgtgaggagtggctcgggcacaggtggtctcaaagggcctgttaccctggagctgcctccctgcatcttagcaagcctcagaaggcacagggcattttgatgctgtggcactttgccatttgaatttgaggagatttgtcttggcttggaaaacaaagcattcaacttgtagcaaactaaaagaaaaaggaagagaagttgagaacaaacactccatccaggagtttgggctttgagatggggatggggatgggacggagggaggtggaaaggaagtaagggatgcactacgtcattatcgtcagcatcatcattctatccttatttcatccagtctaagaagactatggttgtaggatgcatccttatttgcgagaaattgaaatatggaaatgtgcgcctgagagttgtggcagccaatgcactcagtgctttccgctcatgtcctcctcttaataactttatcaggcaggttctctcattatttccatcttattggtgagcaaactgagatgcagggggttaagaagcttgcagaagatcactctgctggccagtggaggggccaggatttgaggcaggaattctaacacccttagagcctacccttggctacagtgctctgctcctgagcaatgaaatcagcgttggggtagtcatgtgtgtgtgcgtgtgtttgtgcttgaagactttgatgtcagcattttgaccagatgtgtcagacagatatgttgcccctgccccatcacctttactgagttacttaaaccccaggcccctgttttcatgttattatctttactaagggatgcaactggagtttaagttctttctgtgcatttcacgtcccctctgcacgcccttctcatggggccaatcactgttgggaacactcagagataataaacatttccctgctgtatcatcctagaggatctgtcatttattaactgtgtaccgttggcaagaacctctctgcacttgtttcctcatctgtatgatagaaataatacatctcgggatggtagtgaggaagggagggttatataaaatgacttccactgaagtgcctgcctggcattcagcattgtatagagccggaactccaaatgtcttctgcttgtacctgttttccttctccccaagtcacccagctcacaggtggccgcaagctctgaactggaactgtttctaacacatctggctgcttcccctagagacagacatgcaaatagcttcatatcctcttgtagctgtaaccatttgcagacaccttattgtcttacagctttttaatttgcctgcacaaatagacctgcctggccaacttggagggaattttaatatctaagtgcggccacatacatatgtgttgtatactggggccatgccttcctgcttatcaaggcaacagaaatcttgtacatggttttcttactttctggataaagatgggaccttgtctctccattttgtcataacacttttttatctttactttaagatgaaaccctccttaaaattgtgagtgtttccctggatttccctggggagaaaccactacagtggctttgattctttttcccctccttgggatcattctgatcccattccatatctttggagggtctatggaatggggctcagctttgcatcttggattcacaagaagggaagcagggagtgagggagattgggggaccgtgggcgtgtttcatcagatgcagctccaatggccttttccctctgaccatatttcaacaaccacacttgacacacagcctagcctcccccaaagctcacgtgtgcaccctctgcccctgtctggggcctcccctattcattttcagatcgattctgacacctgcttttatctcccttaccccttcagcacttcttgatggcagcaacttaagttatacttaagcatcctatattcctaaaatatgcagaaattaaacaaatgccttgtgctctcagttttcaaagatctctctcttttttttgaggatggagtctcactctgtcgcccaggctggagtgtagtggcgagatctcagctcactgcaacctctgcctcctgggttcaagcaagtctcctgcctcagccttctgagtagctgggattacaggcacctgccaccacacccagctaatttttgtatttttagtagagatggggtttcaccatgttaaccgggctggtcccaaactcccgacctcaagtgatccgccctcctcggcctcccaaagtgctgggattacaggcgtgagccaccgcaccccgtccaaagatcccttgagtaaaaatattcacatcagtggctgcagatagataattgtttggtttttgttggggaaattccaactctttgtttagaacttgcctgattttcagtagcatctctaacacttagagttgatttggatctggcattatgttgagtcatcatttttagtgggaagaatactatacaatgtgaaagaaagtgtaaaaagtactctattttaacaaagttgttttctttctctttcttctttttttttttttttcacagcgtcttactctgtcacccagggtggagtgcagtggtagaatctacgctcactgcaacctctgcctcccgggttcaagcgcttcttatgcctcagcctccccagtagctgggactacgggtatatgccaccatgcctggctaatttttgtatttttagtagagatggggttttaccacgttagccagactggtcttgaactcctgacctcagctgatcccccttcctcagcctcccaaagtgctgggattacaggcgtgagccaccatgccctgcctgttttcactttcatatgctgtcttttatatgtgtatgtgtgtttacacaaccaaggtcccgacccacataatattttgaattctgttgctttaacttaaagcagcggtttaagtggttaatttaaactccattttcatgtcttcatgttattttaataacagtagcattttttgattggtccaagattataggaataatttcataaatgatagttcatatcctagagtgtttccaatttttggccactagaagggaaattctatagcaaacatctttgcgcgtccatcttttagtttctgttgaattaatccctcggtgtaatttcccaagagggaaattgctggatttgaagggtgtaaacatcatcatggctccagtaatgcagtgcacgtggggagatttttaaaatcagtgttctctctgttggcatcttgtgccagaaaaatgtcagaagaaaataatgcgaatgaacaattaaaaagctaatcccctctttaactcttaaaaatatggaaatgaaataggggttttggtccatggatgctgcctgggaagccccagctctgttactgcaggcatgcctttccttgggggagagatcgtctttccagctatctttgcttctggagaaaagatgctcacagtacttgttcaacagccgcacttcagcctcctgcacttgcctcgtactcaccttcagcaatgccaaagcgcttaggcctccagcatacatcatcaacgccttctgtctgttaactgtgcaacagctcctctctgatttgtgaaataattgtgtgtccactgattaatgtgtatgttttaaaacagtgagatttgggttggaatagaagagggttttgagatactctcaaataattagaaagacaagggagtggacaattagaaatgggaactaattatggcttattgagcacttaccttgggccaggccctgctcgaaacacgtgacatggatgaacttattcagtccccacaacaactctactaggtaggcaaattgttctccccattttataggtgagataactgaggccaagagattgagtatattgtcaaggacacacaagatgggaacccatgtgtatcagtttgctagggctgccatgacaaattcccacacactgggtggctttaaaccacagaaatttgttctcccatggttctaaagggagaccagaggtccaaaatcaaggtgtcagcagggccgtgttccctctgaaggccctagggaagaatccctccttgcctcttcctggcttctggtggctcccagcaatcctaggcatgtcctggcctgtagctgcatcacttgaatctctgcctctgtcttccatggccctcttccctgtgtgtgtctctgtgggtcccctcctcttctcataaggacactagtctgacctcacttaatttaactcattatatctgcaaagactctatttccggaggtcaccttctgaggttcccagtggatatgtatttggaagggacactgtgcaatccactatatcacggtcatagcacgtcacagtggattgtacactgcaatccatggttgcaggtccctagtggatatgaattttggagggacactgtgcagtccactgtaccatggtcatagccaggacctgttcctgccttctaggacaagagtggagaaaagggaaagaaagcagaagcctgggtaggctcagggtttgcccaggtgctcttgagatggacaaagaatgggcgaaaatcccttgggcttttaaaaggttgtgtggccgggagggactggagccctgggcgagatgcctgcctgagtgaggtggggttgctgggcacagtcagactgtgtgaagactgtgtgagtgtgagattatcctgggcagaactaaacagctttctggactcaaggggaggaggcaggtttggagttaatgccccgccatgcttgagtagcttaaataaaggttacctggactatttcctttctccagcagctacgttactctgtctctgaagccatgggggaaccccagaggcagacatcagcgtgtccaggttgtaaaatcagacttggagcgccaggcagggaagaaagcacttcggcatgttttctgcctcactgcaaaataaatgtataagcattccagggaaactgcagggagaggggaacattcttcagcaggcaaggaaggataaatgcaaagtaaacgtataaggcttataattactcatttgaagtgtgtaaaatgtaattaatatgatctgtgttgcagtgctgtctctcttgttttatttaagtgaacataaaatgtaatttatgaggacttccccaggttaactgccaatatcaattccttgaactgcgttttttccacagcgtcttaagtttctcagcaataaagttcttctactactgtgggggttttcagggacaatttatgctgaggtttggggtaggggctggttctcctttaccccagacactcacaccctccgccccttaggccagcctgaagatgccaattcctatcagttatcttctctgttaatgtgaggtctttttcatgtcactgtgatgacagtggtatacagaaaaggcttctaataaaattaaactcacaaatctaggaagctacctttaaatttcgaatcttactcttctattcataagccttcaacagatacatttagggtggcctttaattaatatttggtcctttaacacacttaatcttctgataacaatttaaattgcatctaaaatgtcatctatttacagttatttttgaatacttcatttgcccaattaatgaacaagcatttatttattcatttgtttatttattttgagatagggtctcaagcggttgcccagactagagtgcagtggcaggatcatggctcactgcagcctcaacctcctgggctcaagctgtcctcccacttcagcctccccagtggctgggactacaggcgtgcaccaccacaccttggtggtgtttgtattttttgtagagatggggttttgtcctgttgcccaggcaggtctcgaacacctgggctcaagcaatccacccgccttagccttccaaagtgctgggattacatgtgttcaccatcctgcccggctcaagtatttacataatagaaatctaatgcctcaaacttagaaatatggtgaatcttaagatttatttatttatttatttatttatttatttatttattgtttcagactcttcaattcgttagagattaagtttgttttttgttttttgttttttttttttgagatggagtctcactctgtcacccgggctggaggagattaggttttttaaaatgctctagtattatatataaacttagatttcagcttaaaatttcaaatcaaataaattgttcaattaagtctttcatattgtattgcaatgtagatctattcaaagaggccaaaatcttgaaaatattaatattatgggttgattcttaaacatctctatacttattttaaaaacagttttattgaaatactatttacatgtaaaattcacccactttaagtgtagaattcaatgaattttagcatatttatagagccgtacagcatccccgcagtctaattttagaacatttccatcaccctagaaagaaactctgtgtctatttattgtcacttgccatccccacccctggccttaggcaattgctggtctactttctgtgtctatgtacttaccagttctggacattttttgcacttcatttgcaatcatcctaggtttttaagaaaacaattttggcatctcaaacaatattggggtcaccttctcaagccacttttcgggttacagcctcagaaggctgaagctgctttcttcagaactgagctctgctctgagtgggttcctgcagcctatgacccagacttgagtcacagactggctcattccaatgtcttgccgccaaagaccagacccacccaggtggcttccttatgtcttgattccttccttgcctgcctcgggctcacaaacagctttaagacttagttaagtgagagctgactgaagtccatcccggtgatgtttgacctaaggtcactgttctaaagttctgtacatgacagccatgctccattgcccacctgccatccttacagcaccaacttggaggccaccagccaacctgctcaccagcagcctctgggctccgcctcagggtgttgctccacgtcccagcaaaacagcttaaaaagcaaaaccgcagccaggagttgcatagatacctgaacacccgtgttcatagcagcatgagtcacggtggccagaaggtggaagcaaccctaatgcccatcagtggatgaatgaatagtggtatgtatgatgggatattattcagaataataatatgtcagaataacgaaattctcatacatcctacagcatggatggacttagaaaacattacgctaagtgaaaaaagccagacacaaaaggacagacactgtatgatcctacttgtatgaagtacttagaatattctaattcagctgggtttggtggctcacatctgtaattccagcactttgggaggccgaggtgggtggattgcttgagtccaggaattcaaggcaagcctgggcaacatggcgaaacccatctctataaaaaaaattcaaaaattagtcaatgatggtggcctgtgtctgtagtcccagctactctgaaggttgaggtgggaggattgcttgagactggaaggcagaggttgcagtgagccaagattgtaccactgcactccagcctgagtgacacagcaagatcttgtctcaaaaaaaaaaaaaaaaaaattcaaattcatagagacaggaaatagaatgggggttaccagggacaagagagacgggaatggggagttgttatttaataagtacaaagtgatgtatagttggtgatagttgcacaagaatgtgaatgtacttaatgccactgacctggacacctgaaagtggtcaaaatggtaaattttatgttatgtgtattttatcacaataacaaaaaagcaaaactgcagttgtattatttcttgccttgaagaacttattcaagggttctggtttgactacagaatcaaatgaatgctttttcggtttggcctcaaatccttttctgggatgacttaaagttcccagcactttgggaggctgaggcaggcggatcacctgaggtcaggagttcaagaccagcgtggtcaacatggtgaaaccccgtctctacgaaaatacaaaaattagctgggcgtggtggcacatgcctgtaatcccagctactcgggaggctgaggcaggagaattgcttgaatccgggaggaggaggctgcagtgagccaagatggcgccactgcactccagcctgggcaacaaagcgagactctgtctcaaaattaaataaataaataaataaataaatgaagatgcctcaccctagctggcccgtcccttggctattaggtgccgcatgacccttgtaagtacctacacccaggcccctggcctcgttggccccatctggcacagtttctccccctcctcttctccagatggcctgcacgtgcgctgtctatgtgcgcacctgttcctcatgtctagctgatccagcatccccagactcttccaagatacaaatcccctggggtgctcatcaagcttgaagcttcccaggcccctttgtaggagaatctgattcagaagggctgggaatatatgttttttaaataagtacctcggatgactcttatcaggaaagtttagaagaccttggactggggtgactgtatttcaaaacggtttagtttcctgtcttttgggaaaggcacttccattcattcatttattcattcagccctgaatttaggccccttttaggaaccgaggatattgtgatagacaagacagtccaagtccttttgctcatgaaacttagggtctcgtggtggcaacagacaacagccaataaagcatttaagataaaaagacaggagagaatcaatgccttgaagaagcatatggcaggcggggcgcagtggctcatgcctgtaatcccagcactttgggagactgaggcgggcagatcacttgaagccaggagttcaagaccagcctggccaacatggtgaaaccctgtgtacttaaaaatgccaaaaattagctggacatggtggcacacgcctgtaatcccagctacttgggaggctgaggcacaagaattgctcgaacatgggaggtgggggttgcagtgagccaatatcgcaccactttactccagcctgggtgagagaacgagaccctgtcttaaaaaaaaaaaagaatatagcaaagaatgggaggaacaggagagagaggaagtgaggccatgggagacagtgtgtccagggaagctctctctggggacctgatgatgcggtcagagggcagagtaaagaagagaacagttgttggtgttgggagagggactccaggctgacagagcagtgagtgcaaaggccctgaggctcatgcttggttttttggagaaagagcaagatgaccagtatggtggaggaggggcagaggcaggcggggctatatcatggggggcctctgggccgtggaaagactttggattttgttctaagatggtggcaggtctttggagcaggaaggctgttatgatctgatttacgtttctagaagattattctggccgctggtagagaatagagtagggaggccagggtggcagcagggataccagttaagaggtttttgtcatagcccaaggggaaggcgatgatggcttgtaccagggcggtgaggacagagacatgctgatgggtggggcatagcagacagaaaagggaatttaagaaaattcctcactgtttggtcacagctaggggcatgatggtggcatccactgtgatggtgaacattgtgggagggaaattttagctgtggaagccatgagttctctttatcaatgtttaacatattccattcataagcaccctcaaattgaacttaaaggaagagtcaagtcaaggccagaggtcccacagcagggctggaaagcacacctgtgggacttctggccttgacttgactctttccagatatctgagtcagacgttttcaaagcatgcaccatgacccacgggtgtgttgtaaaatggatttaatgagttgtgactagtagttcataaaagaacaatagaaaatgttagtttgtcacacatagtaaggatagtacttttaaaataaaacttgtctcggttttctatatatatttgtatgtaaatcacatgcaaaaagagaaagggatgaggccaggaatcaggagatcttcattttagctgcaactcggcctatagccagcagtgtgtccttggacagatcaccttctatcctgcacgtccatttctttacctgcaaaatggggttagggatgaggtggtttaatcttttaatacctggcacctcctcccctcccctcccctcttctcccctcctctcccctcccatctcctctcctcccttccccttctctcccttactctccctttctctcttctcccttcccgtctctcatgctctcagtgggtgggcagcataccccactggccaggaggattatgtttgaggtttgtgtcttaatctgttcagggtgctacaacaaaataccataaactgggtggcttatacacaacagaaatttattcctcacagttctggaggctgggaagtccaagaccaaagcattggcagatttggtgtctggtgaggccctgctttctggttcatagacagtcccttcttgctatgtcctcacatggtggagggggtaagtggtcttttttgggacgtcttttataagggcactaattccatttaagagggctctacccccatgaccaaatcaccttccaaagtccccaccctctaaaatgattatcttgggggttaatattttaacatgaattttagtggggacacaaacatccagattatagcactttgcgtcctgccatttctcttgctcagtcagaatcagttttgaggatactttccctaaccacgtagattcattctctttccttctgtgaaagtcattggactaggtggtctctaaagggccctttttgtcttagatgtgcctgatggtgcactaacctgtcaggttgacaactgatttgtacttggacagggatcttatactttcggaagtaggcatgctgtctgggcatgtttctgcagatgggccagaattctctaaaagagggaatgggttggctgctggggccattggtttgggggactccatttggtgacccagttcttctcctggccggtaaatattttaatgtatacactatattcttcaaagctgagtattagagtccccactggaaggcttccatgtcagtaaatctcacggctcttggatgaagctgcatcttttcccaagctataccaagcacattcacgtaattcttagatttactcccttgaccttcatatgccaagtttaattcactttagttctacaaccaccttctacaggctgggcgtcgggaggggctcttgctttgaggagctggagtaggagaggccaacacgggaatggctatgatataggttcagattattctcaaatcaaatcaaccccaaatccctcagtattcttcagtgaatttgcttatagggtctccagtaaggagagagagatttgggaatggttttaatggctctgaattgtccctgtgggagggactgggtgagggaaggaatgggaagttggaaaacttaagtttgataatggcatgaatgacaggttaggctgaaccctattttcacctcactgtttcgaggctcctgaaaagtcagttgtgaatacaagcgtgctgaatgttttgtaaagctcctgaaggcctgattggtgggaggatatcgggtcaacatttgggactgcctatttgcttggtctctatcagtcccaaacatctgtaagctgtgacatgtcccatttcccaggagtgggggaaagcatgctggtttgtgggtttgaatcccaactctgacattcactagctatgtcgctgggtcagtccttaacttctttgagcctcagcttccttgtctgtaaaatgggtgtgatacgacctacctcctggctggtggtaagtaatagagagagacagtaatgaaggctcatgtttactgggtcttggagagttcatttaaggcacatcacagcaccacgacagcatatcatattaatttttctttttgatttaactactttggctaaggtaattaaaccactttgaggaagcattggcactttgagaagaatttttcaggagagaacatgctaactcctcttctttgttcatttgctattagtaagtcatttggtctgataccctttagtagaatatctttggttaagtcctcagatcacttgatctgttgtttttattcatttgacacaaacataccgagtacctgctatgcacggagcacttaggcagtggacaggtagagaggggcaaacctggcaggtgaggggcttggccaggcccaggtgtgatctccagccctgctttgggacctctggccattctgtccccacactgggcccagtattttcctctgcaaatgagcagggtgaccagacgagggctaagaaaccctcagactccaaacatgagtttggattcaaagagctacaggatccttgaaataaaatgaaatctcacagagatagtggttcctgggtatttttaaatctcggagtggattagcttcagatgtagttttcgggaggacttattggcttctgtttacctctcatatttatgagaacggtttaggattgaaccatgtctaagccaaactgtgatgtagaaggcttcgggcttctgtactctccctcctcttctcccccatccccgcttttattttgctttttcttctctttcctccagttctggtattccttccagaaatcaacttaaacaatgcacttgggttctaagtttcttcttttgcatttaaaaggagagtagggcttgacgtggtggctcacgcctgtaatcccagcactctgggagaccaaggtgggaggattgcttgaatgcaggagttcaagaccagcctgggcaacatggcaaaactgtttctacaaaaaaattgcaaaaattatctgggcatggtggcatatgtctgtagtcccaggcactggggaggctgaggtgggaggatcggttgagcctgggaggtagaggttgagattgggccactgccctccagcctggatgacagagcgagacactgtctcaaaaacataaaaaataaaataaagtaaaaataaaaggagagtgttggcagtgctgaactcaacataatgttagtcattgctaaggagagcttcaaggtgcctctgttagaggtcagattcttcccactctgagatcccctaactctgattccctcctgggagagcttcaggttgcagctgggttaccgagacaaggagtttgtcctaaaagctacccctgtggcccatgccccactgagctacagactaccagctctgcttctatataaggttttttttggaggggatgtcactatttttgtgttattattagaaaatgataaaaacctcaccaccaggggttttaaaaccctggtggattgtaaccaggtagagattgttctcacagctaggtgttgcttttccattccctgcctctcctggcctcagattctttcctcctacaccaattactgtttcactgctccccacccaccacaccttccaccttgactccccaaacctgagcaattctagggcttgtttaacccatggttctacagggagatgccccaccgccctgtgtttggaagttaggaatttagagttggaagggacttagcgatcacctggttgaacctcttcacctgacgaaggagaaaacgaggcccagggagaccttgttcaaagtgaagatcttagtttggtggcagagccagggctgggatccagctctgtggctttccacatggacagtttttgagtgccatggaccaggctagttgagtgccatggaccaggtgccatttcattcccactaccaccttataatacaggcattattaactgcattgcatagttgagtttcagagattaggaagttgacccaaggtcccaagcctagttaatgggtaaaactaggacttgaatccaattctggttgaagcttctccttccaaatggtgttgctgggtgagcaactcatcttggtttgcctggaacttacttggttttagcactcaaagtcctgaatcctggggatctccttggaccaggcaaactagactggttggtcactctagtttcatcacagtgacctcagaagaggatgaggaagagctgggagatttaatgtcctttgagggctgactttgggtcccccaggtacaaaacagaattgcctgtctttgcaggagcagctccttctgaaggagctgggtattgctcactcctctaacttgatgaggttgaatcagacactgttctgtcttgacagatgggctgggccacactgctagggttccagcatgaatttgtgcatttggaaaaaacgtttctgcaactgcattgctgctctgcactctcagagtgtggagcagatgaatcatgcccagcctgttagcaagtccggagatttggaaagtgtccgaagtcaaccgagtattagagttgttttgccagcggaaggagcagagacccatctggacttgggtgatttagtacagcagtgcttcatttcgaaatgttgagggaagtgacagtccaaaaatggtaggagttgtaagggtaaaagcgtcttttactgcctttcgagacagcacggtgaagagcaccagtgctggaaataaacagacgtgggttgtcaatttgctacttgcccttgctgactgtgtgatcttggacaagttacttaacctctctgggcttcagttttctcaagtgcaaagtgggactagatgatatcattattacatctaacttaaagtgtttttttatgaggattcaatgaaacaatgtgagaaaaaggctgagcattgtgtcaggcatcagatacatggtacattctcgctacgtggtagtttattttgtgagatatgacttccgtccctggttctgctgctagctacactgggcagttcaggcaagcatgtaaggtctccgagtttcttctgtaaatcgaggggattggcctatactcgaatcccttggaattctgaatgtctttggttttaggacatgcgtgagaggcaagttcctactcagggtcccacagtatttcagttctatgtcttcagacctgaattaacaatccagcatctcccctgcattccagcagcactgagaggggtcacagggagtcgcccagagaaccaggtgggcttcattcctttgtcctgagccagctctccgtgggctgctctcagttagcagactgggaatggagtgtccacttgaaaacaacgtgctcttcattacaatgaaacaaacacgagcggcttgagtttaattttagcttcatttatgtatcgtgggagatatagaactgttcctgggtccaagaaatcatactgtaaattgagctaattagattctttaaaaaaaaatctttaatcccattgatttgagtttagagaggagaaaacaagtgttgtggctaaataaaactcccagtgggcggggtggacagcagaagcctgccgttaaatgtcctcagggcctcagggatttcttttgcggggcttttgatcatcagacctttcatttttcaaaggaaaaaaaaataaccatagcctaatgctactggcagttttctccttatatagcaagaaccaaacctctctgatgctcttaaaggaagtgttaaatcttctatcattcataaaccttttgagtacctactacgtgccaagcaccacagcaacaaatgaataggttagagagaggctctatccccaaacccagtgcctggcgagttgccctgcacatcgtaggtgcttgataaaaacttgtcgaatgaatgagtgtaatgaaaccattaattaatagtttgccatcacagcattttgatgaatcctgttgtattttggacttgtcctggaagtggccagccaaccaggtctcaggccaggaggagactagggagatgtttgacttacctgtcagtgaagaggtgacccagtgtggcagctgagaccatgggctgtctaaggcagaattctgtctccacctctttctagtcatgagacctgggcaagttacctaaccctgccatgcctcagtattctcatcagtaaagtgagaatggtagtagtacccgcaccatgggactgttgtggggattaaatatgtgaactgcttggcgaagcattggtgccctctaaaagttagctgccaccatctgggccttggttactcaaacttccctaatgccacttgtaagatacatgtgaggtgaatatactcatgtgcataattgctggtccttcctttgcatcccaggcaacagagtaggtcctcattgttaccatttacatatgactagcccagaagtcatttgtggcccctggaaaccaaaagcccccagtggtctaaacctgagagggtacagtggagctcagcttctagggagggtccgaaccttcgcacagcatcagcagtaggagatgttctacagctcttattgtagatgctacagtgtcttctgaggtagatggagccaggttgtgtggaaattgtttattctgtaattggatgctcaagaatcagaaagcataaagagtataatttgtgtctctcttccccatggtggggaagtcttattaaaatgcagattcctgggccttaacttccatctccccctccttctgattcaacaactctgggatgaagcccaagaatgtgcccagaaatctgcttttttaacaagcaatatcatggggaaagtgagtagggcacacgttgagaaactctagtttttggaacatgacacggaggatttggggaactttatcttttcttgactctccttctcatccttccacagatcactgggcccctcctgagtcgtctggctccttctttcctcttggggagagataaagtgctggcccaagcctcccaccctggtgggtggggtgggccttgactcagtggtctgtatcctcgtggccagctggcctagctgagttgggaggtgaccctcacctcacaggttgggcagcacctgtcagtctcgaggctcagcttggctcctttccactcacatgaccttgaccatggccaagtgcctgcagctaagggaggcgcggaggggttatctgtaaaatgcaggtacttcctttaccgtgggaaggatcacactgcaccgactgcctgttgcatagcgagcactccagaaacggtggggttgttatcattcccataaaaggcacacaaggcccctttagcttttgtggtctggggagccaaggccggttcccatggcacccagtgaagtcacgggcagggctgatggctgtgggcaaagaacccaaggttcaggccccacacggtcaaagcattttaaaggccttgtattagacaaataaaccaattaaataatactgccccccataaaagcagacttttaatggattccatggtaggcttttcaccgcgcggtcccggagccatgggcctcgatgagcccgtctgccgccatagggagaatttaatcttgcccggcatgggcataattttacgagttttatggctgtttttacttctccgaagtgttgctatgtcattgtgcaccaagggcaacttgcgtgcatttcacagtttacctcctttttggtggaaatgaaaaatgaagtcataaattaaagaaaaacacaacatagaatttttttccgtcttcttggggcaactggaggaacaaagaaccagtgtttctctgtacagcctgatcaaattctaatggctttaatgtattgacatttgcctgcgattccctcctccccagggaagactgtgggcatgtagctatgtttggagcttgtactactgaccccgagaagacctggggcagttctctagggcaagggttggcaaactctagcccaagggccaaatctggcccactgcccatttttgttcattggtggaaaaaactcaaaagaagaataatattttctgacacatgaaaattagatgacattttcccagatttccctgttcatcagtgaagttttgttggcacccagccacacccattcatttctgtatcgtttggggaggatttcacaccacagtggccctgcggaagagttatgacagagactgcagggtgcaaagcctaaatactgtttggccccttacagaaaattttgctgacccctgccctaggaagtcaaggaaaaggaaagagaaaacatggcatcttgtttctgggcattgatgattgactttcagagtttccacgtggctcaaagtgacaagtcaacggaggctcacctgagcagtagtttttcctccggagaccttccagatgtcatcagctgcttttggatgactctcctccctttcctgacctcagattgacttctaagcagaggtccctgggctaaccccctgcagccagccctcccagtcatttgagctgcaccctgcttgaggtctggtcactcctcatcagtccccttgatagccacaaatagagaagttcccgccttcctcccagggggatctaaaatagcttctgaaatttgtcaccaacacttttaaactgtggcttttggccaggcacagttttaagcattctgcacatagtagttactcatttaatcttcacatccaacccaggaagttagatgcccctgtcattcccattttacagacaaagaagcagagacacagagaggttaggtagtttccttaaggtcacacagctggtagtggtagagccagtattgaaacccaggctatctgttccagggaatgtcctgctgtccattcattgcctctgtggagcaggtgaattctttaggctcatgaaaggatctagttttccttgttccactcatgccactgttgcacctcaaaccataagaaaactgcctcgtacttgagaagaaagccccatttattcttcccccatctctcttttttccctctctccttctttcctttcttccttccctcccttcttccctccttcctccttctcggcttccttttttcctttcctccttcctttcctccctcttttcctctctccttcttcccttcccttccttccttcgcttgctcccctccctttccttctcctttcctccttccctccttccttctctccctctctactgctctctttccttccctcctaccttccttttttccttccttccttccctctctcccaatttcatccctcccttcctccttcctcctccctccaacaaataatgatcaagcccatgactatgcgttacataatgcatgaggggctgcacagagtgaacaagaaaaatgaaaaagaaagaattcattgccatttaaaaagagctcttggtggcttcaatgttggtggggtttgaggagttcacttattccccctcttttattaattgtaagtaccatctctgtctggaatcataaactcttgtcttttctgcttcatgctgatattttcactaaaagtaacataatttaggagaggttttggggaggctgggcctctgacctgtccagtgggaggagcctcctggggaaggacctgcccattctcagaagcccagctttcagggacaaggaatgaaaggtcattgactgttgctggagaagtctgcggaatcttaaaatgtgttaccaagcctgctgctgggtagaacttgctgtcttgaagcagccattacgccatcttttgtaagtggtttcatttcaatgagctttagatgcctgtcctgttttcttaaaacacttgctggggagactttttagcatgatctagatccttctgggtgtggagatgcctgaatgttgggaagacagacagcagctgtgctgttggagaagggacagtgtggaaatcttcctttgctagaagctggttttctctttctttcctgcctgtttcttcttccctactctgtgcctttttctttgacagacaacaaatctttgttgctcatttctgatgagccttcactttctttcctcagtcatgcggaggaatccctttggtgtggacatctgctgccggaaggggtcccgaagccccctgcaggaactctacaacccaatccaggtaagcttcaagcactctgtcagcatgtgaattttttttttttgtaggtatggatactaaaaactctaaaattgtggtctttgggggatttaaaacttcctttcacagcctggcattttaccttcagtggttgctttctccgtcaccctttttctatgtagcatctctgaaaaatctagcaggggatgtttagaattagagaaatgcctaggtttagtgctaagcattcagacctgcccagggtttgaactcctgagattaacagtctcaagttcgagcaatgggactcgggaattaaaggtccaccgaagctgtgcagtcttccctttggtatccccaaaggaagagttgcacatgggtacacttgacacccattcccacatcccacatattaaagcccagtgatgccccacctcactgtgccagtttggcaaactcccttgcgagcggggaccttttgctaagtgactgcctcagtaaatctaactcgttagtttaatgaggcagcaaacgtggcctctgtgccatcaattatgaaaagagctcctctttgagcaaaagaaaagctccaaccaaggaaaagtgtcttctgtggaaagctagtgcaaagttaggaggcctggttgccatggcaacagcctcagtggtgtgtgtgggtcttgatgtggagactctggggctgatccttttgtaggaacattaattagcacttgatgcccagaactggtaagtgaacaactagcagcagcatcagtggaccttcgatagccgtagagaaagagggaaaaatgtactgctttggctacagtctctgactaaatttaatacttctttggaccaaggtacctggtggaggaagataatgcacgggcctcaaaggtgtcgaatttttagaactcttgtaaagggatgcacttgagaactatctgatgccccctaccccccttcccaatctctcacctgcactcccttctggaaaaatggactcctgaatttatgcatcatgggtggcctaattaggttaactcatgccctgtcttgaggtgtgacttggccagattagcccattaattgccaagtcagtattgcctgaggcttcctgtactgggttcggtggtgactcagtggggaatttgatagttgggttccctttggtgcccaaaaaatctccatattataggcaggtctcccagcctgtccacacacaccctgtcctaaggaagaggcagaactgtgcttcaacaaaggataggatttctggtaacccgtgtcaaaaacaacacaggctcctcagatgcaaaccattcccttctttttgttgatatcctctgttctcagatgattttctccttcaaaacaaaactactgaaacactgctgcaaattttatgggtaacatatggtgtcatgggaaaagctatatctgaagtcaccgcccctgtggatggaaggtccatggactgcgtctgtcctgttcactgttggctcctcagtacctaacacagggctctcaaatacttgtgattcaaaacatgaaagtccaggttcaaatcccggcttcatctctaactagttgtgcaaccctgaatatatgatgagttatctttaggggtcagttttcctacctaaaactctccctggaatgttgggaggatgaaataattctgatgtgtcaggggctctgtcagtatgatttgtcatttttgtggtcaggagggtggcttccatatcagaagccttgacttaggagtcagacctgggttcaaagcctagtttcatcatttcttagctatgtgactatggggtgtttacttaacctctctgagatttctttccttgatttataatgtggcatgagcaatacctgccttgcagtgttgcatgtggtgatgtgtcttgcttggagcttcctgtggagtttgctccttcatgggttcattcactcctttttttcattcatttcttcatgtgctgttacatgtacctaggaacatatagcttagtagcttagcagcttagcactaggcgctgggcacaaaagggtggagagggtgtgtgcttagccttttgtggctggtaactctgggcccagagttgaggggaatgatttgactggcgaggcagactctgcttggtcccattgtaaaccagtcatagaagagatgcctgtcctgggtaggggccctctcttccttccggtagtgttctgagcattgtctggatgacaggcctattgagcagtagcctgggacttgggagggaaactagggctggagagcagctctgggaggcattggggagggcgtaggtggatgagtcaccatcctccctcaaggacgtcttgggcaagttgtctggccccattagccagcaaccagggaaatgtagctgcaggaaaatcacctcgtttcctcgggatgttttttcttaggctggtttcctttacaagctgcaattatgttccatcccacgcaagttcagtaagtggcacttttcagagaaactgtcttggtgatcatttgggctgctgtgggccagggagttgaggagagaagggagtgagagcttctactgagtttagttggttttgtgtccatgagccatttacaaactttgcacctgattgggctcagttgcagtttcttgtatttccctaccagccaagctgttgaagctgctgagcccggaatgatgttatcactgaggcagatgacaaaccctctagttgctagaaaccaaactgctccccgagctggtgtttccgttttttgtactgactgcttatttgggcttgatatataatggtgaaaacaggaactgtttattttaggtgataagaaaccaacattatgacaagaagatgtcatcttagttactctgttaccagtaccataggccagatactatctagatgcttataaacatcttatctaatccttgtaataataagccccaagctaggttttatatccccattttatggatgggggaactgaggccaataacttcatataacttatccaaggccacaaaactagtaataaacagagtgaaattcaacccaaaaacaaactacaaatccaaatttctttacctctatgctgtctgtacttgctgttactagcaaagttctcttggtgggagttaccccatcccctctccaaaaaaaaaaaaaaaaaaaaaatcaaacccagattttcactggacaaagggttgggaaaattgggaaattttggctataatctgggaaaactggctataatatggggaaattggctataatctgatttgagtgtacagagttttttattttagtgtccaagatttcttattttagtgccttgcaaacccctaaccaataaaacaacaacggggtcaggagatcgagaccatcctggctaacacggcgaaaccccgcctccactaaaaatacaaaaaattctatgggcgtggtggcgggcgcctacagtcccagcttctccggaggctgaggcaggagaatggcgtgagcccgggaggcggagcttgcagtgggcggagattgcgccactgcagtccagcctgggcgaaagagccagactccgtctcaaaaaaataaaaaataaaaaaaaaagtttggagttgatattcttagaaaaactgtactctgatgtcttataattttcctggttctctgctgtttccttggccccaaaataaaatgtaattgccgatcagatcagctggaatcaagtcaccgaaagttcaggaggtgtcaactgcatatttgtgggccgagcacatctgcgggccgctctggctcagttcagaggcacagggcagagctgcattgtcagccattaatagggcctaatttcccctaaatgccagctagggcgagacagcttgtccttctgccccgcccacctcctggtcctctcgtgggttccctgaaatcttcacaacatcatcatgtggttcagccctgccctgcttggttctttctttagcatttacacttgctctgtgattactatgttgcaaggggagagactcacagcacagggctgtccgtgaatttataagcgctgagtctaggaggtttgcatagggcacagcagatccaattgttctaggggtctctgaggaccaaacagtgtccaagggatttagaggaattctggggaactctctggggcggggggcgggggggggaatggctccaggaaaactgagaatgacaagatcttggaggcccccactgaaatctctgttacatggtggcgcctcattggtcaagtcttcagggtgctaaagtaaacttacttctccatcagttagactccaggaagcaggatgaggaggaggatgaggagggagaaggaaggtcggaaggaaagaaggatgagagagaaaaaggaagacaaattactatttactaaatgtataatacatgccagtgaccattctacatatttttcacacgtctcatggaatctttacaacaacccgaagaggaaggtctccagtaaccccgttttttagttaagttaactgaggctcagagggttgagcaatgtgccaatcacacagctcctaaatgggagagccaggcctatgaagcctggctaggttgcaggatgaggagaggctggtgctttatttttcccgggtgaaaacatgcttccttgagattctctttcccagtgactcaagcgagacctgaggtatgctcaggaccagttgcaaaattcacaaaagcaggggccaggacttctggaatggcatggaatggacaatagctgtaaacaattacaggctgggcacagtggctcacgcctgtaatccaacactttgggaggctgaggtgggcagatcacctgagatcaggagttctaaaccagcctgggcaacatagtgaaatgtcgtctctaccaaaaatacaaaaattcgcccggcatggtggctcgtgcctgtaatctcagctactcgggaggctgaggcaggaaaacctgggaggcggaggttgcagtgagccaagatcatgcccctacactccagcctgggtgatagagtgagactctgtctcaaaaaataaaaataaataaataaataaatatataaataaaaattgcagatttattttttgcttagtgaacctgatagatagcccagtgaaggacaggcctttgactcctggctggagctgtcagagaaggagtcacccctgagaattctgccgtgggatagagcatcgcatcttggtgacatttggaagctgggctcattgatttcattgaatgttttagattgataaaagcttgtaatagtccaaaggttgttggggcagttgcgggggactctcttagccccaacctaaatagctttttcagcaatgcttgacaaaatgtgttccttctatggacacttgtagaataaacagaggaaaagggcgtggggaggagaggcacctaggtcatgtaacctgataagcggtatataatagaagctttttgcaaagttatgagagaatcaggagtgagtggttagcctctgaggggcggtgcgcagtgggggcctttatacaggatttgagtccggtctctgaagacacagcacacttccccatgttaaagaagagagacagcatcacagaacggggaacatcagcgaggccacagggagacagtccatggcgcattcagagaactgtgaggggtttgtggctggagtgaaggtgatgccaggggcggatcggagagggggcaggagtggcaggttggtagcatgtggatcaggtcatgtctgccattctggtcatttccaatccatctggtttttacctattggcagggttggaggtcacgaggagcccacaaaaactggcgtgcatcttataacctagcttctcctttggccgcttgctaactgtggggcttctccagggcaggtaatgtccccttccaggcctcagcattgtcatctataaaatgaaggggttagactggatcagtgtttatcaagcctgtggtcttcatattaggaccactctgggagcttttgggaaatgaccagtgcgcaggcctcactgctggcgattctgattttattggtctgggttagggctggggtgttgatatttttcaaagctccctaagtgattctaatgggtagccagggttcagaagccctgagttgaagggtctttaagcaccccctactccctggtactaaaagcctttgattctaagatgacctataacttgcgaatttagggagagagaagcaggctggcaggaccaagggaaaacaaaaagagaaagcagataagctatgtatctgcctttcttcacattccaggacacatagtcctcctgtgcaaataactccccatcttcctgcacccacctatcaccagaccctcggctgatagaaaaatgcaagttagttcactaaaaccttggcactatcagtcctgcacaaagccctcttgagcacacggcacaagcaccatcctataaaatccccagcaagcctttgtctacttgcagtcagttcctctcttgctgacctgcccattgctcccttgcaatgtgttttcatactttttctaataaatctgcctttctttacctacaattcccttggtaaactctttttaccacccacatgacaccaaccccagagagtcacaatgcaggacataacccattatgtgaaaagcaactcaaagcatacatgctgaggttgttcactctacgtagtttctactgtctttctatatgaaggctctgtgtctgtgttttccactaggacacagagatcattgtccctcatctactccatttggaggtttgtgggttcgatgcctatagtgctagacatccagccagtagcatgtgggccaatccgagatgccaagtcttcagccaaagtattgggaggagccctgtgaaagggacccttgagccacttctgtcttgagccagtaagaaggaaaactcagacttgctccaggccaggcgtcagatggacatttctgaaggatcagttacaatcatagaaatgagcatggaatgagaagggccctctgccttttgaatgctattcaggaagaacgatgctgagtggtcacatatgctggggaaggcatgaaagagcagactttgtactgtccccaactctggtcaattaatcccttatttaccaaccacctggtaaatgacgagttcgtctaattatcttctttgactcagcatctgtctaccagccaaagagggattaattgatttggttgtagaccgactccttatgcaaagataatgcttactgccagcctggcagctggctggcaaagatgaaatattacattaacctgatcttacacacagtacttgggagaatgcttcattattaattgcaaattacaatagactagcgaggcccattgcaaaaaaccacggacagtgaactacctctttcactgtggctagtggattcattattcttgaaccagggaagcttcccagtcagatttccagtcaagccaggaaggatttccagtcaagccaggggacatgacagtcaaacacaatttgggtttagaggaaaggattggatgcctgaaggaactggggagtcccagcccagctgtatgacctggggcagtcacttaccctgttcaagccttggttatctgtaaaatcagagcttgataccagtcttgcaggtttgtgagattcagaattctgtatgaaaagcacctaggacagtggcaaggtcagagttggtgttaatcagtagccattcattttctggatggagttaggtaacctgggcattttcttaggggtctgggcccttgctgtgctctgtaatataggctcagacattttgcacatgcacatttggaattttgttgaataataataagatggatgatttcctcttgcctggaagctactagctatcttcattgtgagtacttcctaacaattttgatttatttgtttctagcagagtctgtattgatcagcaagcttgacgcactgatttataaagccatgagtgcctctgtgtgtgtgtgtgtgtgtgtgtgtgtgtgtgtgtgtgtgtgtgtgtgtgtgtctgtggtatgtgttacatatatgttcactcaacctttattctataaaatgtgcagatgcagctttcatattttaaaagtcttctgtgggcatgtctgttatactcccaatgcctagttaggtactctgtaatggttgctaaataagacctcatctctgggttgtgttcatgtgaaagcattgatctcattgattcgtccacatttaactcaagctttctttataggcagttgttctgcttcagaaacagaggtttcaggatcaagcctaatttgatccaatatattcaaatctggatagtaagctcaatgctctaatggagtttttctgtgtcagtctgtatgaatataatctgacatatttaaactggagaagggcattcaagtgaccaaatgacctcggcagtttccacatggtaacacagctgtacaatctgccattttcagaaagttatttcctgaattaccctcaattataagaggcctccacataatttgatttttctgtaaatgacacaactcaagtagcttctcagccaattggattttaaccttgtcagaatggatagaactgaaacaaagccctggcttgttctgaaactgaccgtaggagagacatcgggggtgagagggtggcggcagcatgcatcttcctttcccagtggagtctgtgggtctgatggaccacgcagatctcgggagagtttccaccccatcttcacactagttactctgagatctgaggcacatggctgaacctttttgagcactggagaccttgtttataaaacaggaataaaatgcttgtggttcagttattaaggattaaattagaaaatatacagaatcccaggcacatggcaagatgcccagtcaatgctgatttttttatttgcatgcaagaaacctcctccaggaagctctgatttttttctttcccctccaagctccggtgaaatgtccttctagaatggtgctgcccactagcaatataatataagtcacatatgtcatttgaaattttttggtagccacattttgaaaaggaaaaagaagacaggtgaaattaagtttaataatatttaaaatttaacccagtgtacctaaaaatgattatttccatatttagtcaataaaaaatgtattagtatattttatgtttgtgttttcatgctaagtctttgaaatctgatgtgtatttgatacctacagcacatctccattgggacaggcagtacatcaagtgctcagtagctgcatgtggcttgtgactgctgtcttggacagtgctggtctgtaaaatgccccgttgtccctgcatcctgcccatgttatgacactaatctcactcatttaaaacgattccaccaggctttgcgccccttgagggaaggagctatgtctttcttattcatcttggggtgtccagtagctactatgggccagccccagaaaaggtacccagtggatgtttgggcagtgaatgaagccatttgttcctgtgcctcatgtgacttcagcatggggaggtgaccagggcttcactcccctagaggtgcagaggcggctggccatcagggtggacggtttcctgggacccagtgaagagtatggcgcttttgtcccaagtctccgattcatgctgatgcccgatgtttcccccagaagttccttccggaaagcgtaagtgtgagtattgtggaagggctaacactttgaaacatatcagtcattatatcttaactttgatttcataagacgttatgtgactagtgtgcgacaggtgtgaggcagttggagagaataggagcaggggattggttgcctgaaggaactggggaaagcaagtcacgggactaggaagggattagggggctgcttaagcccagaccccaccctctctcgccgcttagcccacactcagccctgtttctcaattccttccgctcctacctcctttcctccttcttctgtagtgtgcggcacgcagcaaatacgcactgcgtgaaatggaactggaattccctcacaccccagcctgcctccctcactgattgcatattcactgtagtagttcgctggggctgctgtaacaacataccacagactgggtggcttagacaatagaaatgtatcatctcacagttttggaggctggaagtcagagatcaaggagccagcaggattggttccttctgagggccgtgaagaagggcctgttccaggcctgtctgttagcttcctggtttgagggtgatctttggcttccttgctctgattgctgccttcatcttcacatggtgctccccctgtgtgggtgcctggctttgtgtccacatttccccttgttataaggacacctgtcatattggagtaggggcccactgactccagtatgacctcatcttagctaattacatctgtaatgaccctatttccaaataaggtcacatttgaaggtgctggggtgagaacttcaacttacagattttggaggggacacaattcaatccctagtgcttactgtgtgtgtcgtgttctgctagatgctacggcttttgagataaaagtccttctgttagcaaagataaaggatcagggttggcagggacatggagaagagggaactcctgtgcactgttggtgggaatgtaaattggtacagccattatggaaaacagtatggaggttctccaagaaattaaaaacagaactaccatatgatccagcaatcccacttctgggtgtatgcccaaaggaagtgcaagcagcatctgaaacagacaccagcactctcactgtagcagagttgcagcattgttcacaacagtaagatacggaatcaggctgggcgcggtggctcatgcctgtaatcccagcactttgggaggctgaggcagccagattgcttgaggcccaggagtttgagaccagcctgggcaacatggcaaaaccctgtctctacaaaaaatataataaaattagccaggcatggtggcacgtgcctgtagccccaggtacccgagagactgagggaggtcaggttgaggctgcagtaagccatgatcatgccactgctccccagcttggggagaccctgtctcaaaaagaaaaaaaaaagatacagaatcaacttacatgtccatcaatggatgaatggataaagaaaatgtgagtgagatagatagatagatagatatagatatatagatacatataaaaggaatgttatttagccttaaaaaagagggaagttttcagcccttggttacaacatgggtgaacctggggggactgatatggtttggatttgtgtcacccccgtccccaaatctcatgtcgaattgtagtccccagtgttggaggagggacctggtgggaggtgattggatcatggggtggatttcccccttgctgttctcatgatagtgagtgagttctcatgggaattggttgtttgaaagtgtgtagcacctcccccttctctctcttcctcctgctctggccatgtaagatgtgcctgcttccccttcgccttctaccatgattgtaactttcctgaggcctccccagccatgcttcctgtacagcctgtggaaccaatgaaacctcttttctttgtaaattactcagtctcaggtagttctttatagcagtgcaagaatggactaatacagggacagtatgctaagtgaaataagccaggcacagaaagacaaataccgcatgatctcacttatatgtagaatctaaaaaggttgaactggtagaagcagagagcagaatggttaccagaggtggtgaaaacagggagatgttggtcaaggggtacaaagtttcattagatagaatgaataaattctggagatctaatgcacagcttgatgactatggttaataataatatattgtagacttgaaatctgctaggaaagcagatcttaaatgttctgactacacgaaaaatgataactatgtgaggtgatagatgtgttacttagcttgattgtggtcatcactttcactatctatctctctatctaagcatcatgttgtataccatgaatatatataatttttatttgccaaattaacctcaataagtctggggaagtttgtgctctaattggggtgtcaagccagtaaactgactgaccattataaaatgaggtcctggccagacgcagtggctcatgcctgtaatccctacactttgggagtctgaggtgggaggatgacaagagtttgagaccagcctgggccagatggcaagatcctgtctctacaaaaaatttaagaattagctgggcatggtgttgtgcaccaattgttccagctgactcgggaggctgagacgggaggatcccctgagcccaggaattcaaggcaacagtgagctatgattgtgccactgctctccagcctggttggatttttttttgattaaaaaaatttaaaaaattataaaatgatgtcctatatgagtttaatacatgacgttggaggagcatagagatagacctagactaggcatgtgtatgtgtgtgtgtgcatgtgtgtatgcatgcatgcttatgcatgtgtgtgtgcatgcatgcttgtgtgtgtgtgtgtgtgtgtgtagagccttggtcatcccgacagagcaaagacacaggagggtggcacacggaagaacaagtgactccaccctcccttgcacagttaaaatctggccaaggtgagaggggagatgggagaggggagaggggagaaaggagaagaggcactgactggaggggctgaagctttgtccctcctgggcaggcgttctccatccacacccctcttcttggatagagaggataagcaggccaaagatgcacgaaacctgagttccactgtagctccagacttctagaaaagtcaacagcccctgtatctctagctgatcctctgttgttcaatgtctgcattaccgcactgggagacacttgacagattgggcctgccgcaggccatagcagacattgggcagccctagaacgaagctgaccgtccttggaatgtgccacaggggtgtgacgccccggccaactccagtgctgcctaaaatggcctcttgcaacattcccctctcttcatcttaaatcagggacttgaagccacaaaatggcaaatacacagttctggcagtcgttttgagtattggagaaatcgctctggccatctgttttgtctccagcatgtttctcacggaatatccacggatatatccatggatataacagacatcctgccaaggcagagcttggctcttgagaactcggcaagctcagtgcttgcctggattcctgcctcatgtcccatccagtgtttggagaaaagctctgagagaaagatgaatgtctgaggccacacagcctagaagtagtcaagagcacaggctctagaactagccccacgtgggctgaaatcccagcaccagcgcctgccggctgtgtgatgtaggagagcttcttaccagctctgtgcctcacttgtctcacttgtaaaatgagaataagaattggccgggctcggtggctcacgcttgtaattccagcacttcgggaggctgaggtgggcagatcacttgaagtcaggagttcaagaccagtctggccaacatggtggaaaccccgtctctgccaaaaatacaaaaattagccaggcgtggtggcgggcacctgcagtctcagctactcaaaaggctgaagcaggagaatcgcttgaacctgggaagtggaggctgcagtgagccaagatcacaccactgcactgcagcctgggtgacagagcaagactctgtctcaaaataaaataaaataaaaatcaaagaatagcccctaccttattctcttttgtgagaatttgatgaatccggacatgtgaagtgctcagaaaggtgtctggcaccaagtgaaggctgtttgctatttgctgttgttattgttactcaggcacaaaggcagagaggagcaaatggtccctgggagcaaatgagcaggtggaggctaagatcacttggacaatggaactccatcgtctgccggataatctgccatcatcttataaatccactatgtctaaaagaaacaccatcttttagtgcaggggttcacagctttggctgtactttagaagcaaaaaaggaaatttaaaaaattgcaatgctcagtccacccaatcagtattttctataaaccctcaatgaacaaccaagtttgagaaccacctctctaggtttttcctactcaaagacagatccagggaccagcaacactgacacacttgggagcttattagaattacagaattggcccccaccccagcctgccaaagggaaactacattttttttttttttttgagacggagtctcactctgtcgcctagtctggagtgcagtggcgcaatcttggctcactgcaacctctgcctcccgggttcaagcgattctcctgcctcagcctgctgagtagcagggactacaggcgcacaccaccacgcctggctaatttttgtatttttagtagaggcagggtttcaccacattggccaggatggtcttgatctcctgacctcatgatccacctgccttggcctcccaaagtgctgggattacaggcatgagccactgtgcccggccaggaaactttttaacagactcccaggtggtctgcacaatcattaactggacaagccttcttagagcctgggaggccctagaagaagcaaccctcaagtaggttaggtcacaaaggacgagtggtcccagagtttgtgtagattgctgagacgggacaccagaagaggccctgacctctcttggaaggtagcatgcttctgcttccagaaaccctggaaaataaaaggccgtgtttatgcagctgtggagtactagtccgtggcagggagctggagtcccaaggtgggccagatggatgtgcagcctctcggtctctctggatgcagtaaatactcataatttcatatgactcaacccagggagaagagaaatgtggcattgaacgggtgcctttagaaacagaggtcaccgcagtacctgtaaaaggagaacctgtccagcctgggtggtgtccctggagtgaaggggatttgtggggctagaggatagggtcccctgggtagccacagtcagagttattaatagttctcttcatagattgggttgttccttcacttttcacaagaaacaaggaggaggcaacctaggctctccatgcccgcctctcaccttcactccagcattttccttcaaaagacatttttaggtgtcatcttaccattctcccatcccccctgcatggcccccaaatacctggtgcagcaaatctcaaacaatgcagttttgtgggaagagcatggaatttagacccctacgtcctgagttcaaatcctgcctcttccacttactagcagtgggattttgagcaagtaattcaacttctaggtttcaacttctaggtttcctcatctggaaagctggaatcacttatttaagttcagctaacaaggccacaaagtgtaacagttaaaactgtgggttctcagagtcaggttgcctcggttcaaatttatacttactggcagagcaatttggtgtcagttttctaatccctctgtgcctcagtttctttctatgtaaaaacaagaaaaacaatacctagctctttggattattttgaaaattaaatgagttgatttgtgtaaagtgcctagaacagtggctagcagtacacagtcaaatacatatttttttctttcctttttcctttttttttttcccttgagatagagtctcactctattgcccaggctggtgagccatggtgcgatctcggctcactgcaacctccacctctagggttcaagtgattctcctgcctcagcctcccgagtagctgggattacaggtgtgcaccaccacgcccagctaatttttgtatttttagtagagacgggttttcaccacgttggccaggctggtctcgaactcctgaccttgtgatctgcctgcctcggcctcccaaagtgctgggattataggtgtgagccactgtgcctggcttcttcttcttttcttttctttttttttttttttttaaagcagggtgttgctctgttgcccaggctggagtgcagtggcgcgatcatggctcactgcaggtttggcttcctgggcgcaagtgatcctgccacttcagcctcccaagtagctgggaccacaggcctgggccaccacacccagttaattgttgttgttgttttctttttttggtagagatggggtctcactatgttgcccaggttggtcttgaactcctggggtcaagtagttctcctgcgttggcctcccaaagtgctgggattattgacatgagccactgcacctagccaagtattttttttcttttttatttctatgttctcatctttaaaactttccactgttctttctttaaaaggaaaattgtaatcatgatttgggtcctagtaagtgtgttttaagagaagtttcttttgcccagtgactttcttactccctcacattcagacagcctttcactgcttttcaaatacatcattccccattttacagatgaggcacctgaggcatagagaggcgttttgttgttggtgtgcagcatcatccagcctattcggggagttgcagaaccatgattcagtccagctctggagcttgtttattgctcatgggaccaggcgaggccacctccaccagctcaactggggtcgactcattgattaaatgagtgacctgaattcctttgattcttaatttactggtctttaagtcaagatgaaaccccctccctctccagtggtttgtggaaggagtatacagagcttgtaaatgggctgagtcaatgcctgcccgcagatgggtggtcagctggaatgaaatgcacagtgaagaccatccatgactgtcccaggcacacctgggtggagggtcctgaaagcccccatcctagcaggcaggattcagtgaaatgggagcaaggcatggtgggctgtgtgcccacctgcgcctgtgccggctacacctctcggtttcctggattgtcagcttctcctagaaactcactcagacccctcctgagtcagacagagcatccctgaaccaggactgggtttgctcaggccagaggctgtgcttgaaacgggagttgcagagaaggacttctgtgggcttggaactttttttttaattttccggacacacacaaaaatgttaggaggctgcttttagatgtttcttttttgagctcttccctgcctaggcacagtaaccatgtgtaattttcttatcaattcactcttctcgtcaggggagggctatttttagccactccactgggtcgtgtttcgagcgctctcttctaagccccaaccaagagttggtgttcaaacaggaatcagaatgattcggggtctctttcctaattaacaagaagccctaagtgagtgaaagcaagccccaaacaagcactgggagaggctggagtgggggctgcttatctgggggctgcccattttgaagaaggctgtttacaccgatccatagacttactgggttttggttggctccgggttcagaaagggttaactcatctcgcaaacccattcaccaagggtaaagaattaaattaactcatgctaagcccatggtttttgcagatggaacattctggtttctacttttcaagagcaactcaaaagttcattaacaaggaggaacttgtaatctttgcgaaggaccaaatttgaatgggagaaacggttcccttagccaataggtgagcccagccaactcctcagcccggaagctttgtcattctataattgtcattcccggtgagccttcatcctaggtctgatggggccacttgaagatctcattgaattttgtagggaaattgcatgctaaagagacatttggaaattagcaggcttgaaggctgccttgagacatgtcccctaaaggtattttgtcaccacacagaatggctcccaaatggtgcccccccaactttcttctgctctcttcatttgagtttctctcatccatagaacagttaatctcagttcagaatctcagcctcggctctccataggttttccttcattttccaggataaatgagctggagtttgaaaagaagtgtgacttcttcaaggaactggcagatactaggggagttcagaagcagctgacatccaattattcacggtcatgggggaaagggattgaatgagaaatagaaatccacagataatctccaaaccttatgctcatccatagccttctcttccaacatgcctttaacagtaccaagaaatgggctgatttagcgctgttttcaaaatggaggtcctgagagatcagtacagtaaaattaatttgccaatccttctcttaatgagaagcattgcaaggaatggaaattctccatttatttatttatttatttgtttgtttgtttgtttttattacttacccagagtaaagcgtcatttttcttgagcaagtggcaaaatgagcttattttcttggctggttttgttcattgtttgttgtgtcagagactagcatagaacattgtgactttcttttcactaacacaaaacaaaacaaaaatgattgggattcaggcctagataatcttgaaataaaaaccaggagctaggagaatgacagtcaattgcaattgataattgagtctccttccccaggatattaatggtgtaactaaaccagggaggaagaagtgataagtatcttgttaagataagtctttgccaaaaacaacccatggcaaattgctgccatttgttatctaatactgagcgcagagtgtagtctttcttgagcctcagaaaccctgcttgtctctatcagttcatttcaaatttaacttgctaaatatcattgtccaaagccttggcagactttcaaaagcagcgttgttgctgatctcaagcttgacacagtgggatcttggggagtctcacagaccacagcccccagtttgtgggggcatcttgatcaaggcctaggcaaaggatctgtttggagaataaaagccaagccagcctcaaagatgaacatgtgtggcccggcctgttaaacccagtcaaggcgatgggctgcagacatcctgtctttctctggtgctgtcctagaccttgccattggcccagggccattcaaaacccaaggcctacagtcacggcttcccaagctatggtaggcagaatgccttgccccttttccaagcaataagaatatgttaccttatttggcaaaagggactttgcaaaggcagtttaagttaagggttttaagatggagagattatcctggattatccggatgggtccagtataatcatcaggatgataagggaggcaggagtgtcaaagccaggaaaagagatgttgtgaggatggaagcagagcttggagtgatgtgaggaagggggccacaagcctaggaatgtaagtgacctgtaaaagatggaaaaggcacagaacagattttcccttggagcctccagaaggaacgcaagcctgctaaccccttgactttaggacttgtgaccttcagaatggaagcagttgtttgtagtgatttgttacagcggcaatagaaaactaacatgcacacacccctttttagttggagctaagcttccctctcccaagaccagggtccaaaggaggcctgggagaggccaggtctgtgacatcaggtaagcagtccggcagcagcgtggtgagtctggaaaatgggatgctgatggttgtggtgatactgcctttttcagaattgttttgaggatcaagtgaggtactgtgaaaatgcctggcaaatctaggtataagccggcaaccccggtgacccccacaggcacatcatggcttacataccggcagggaataggctgagttgatacaaccaaaatccttgtacatattcataagaactctttgacaaccacacattcaacctgaaatttatatcagatcacagttttgtggataaccaaaatccttgtacatattcataagaactctttgacaaccacacattcaacgtgaaatttatatcagatcacagttttgtggatgggttcctataggtaggaggtactaccactgtttagtcagtacatttattttttttaaaaggacggagtaaatatttggaattaatggtgttatatttgtcaagattttccttcatgaaatgattatataattcttacagtattctcaaagtacccgcatagagactagcttcattgaaactcacaattctctcaaggttggcaggggagatattatcttcccattttagacagtgcaaagagaaggaagatcagagtattaaataactctccccagccaagtaagctcttaataaatgtcaggtaaggctaaacctgaacgtcgagcctagagagggcaaagagcatgccggttcagagcagacacccctgccaggcactagctgggtgactttgggcaagttacttaacctcactgtgcctcagtttcctcatctcccaatgtaaggataatgtacctacctcacaggtttgttgtgaagactaaatgaagataatgcaataaacggctgagacccatgccaagcacatggtaaaagtgtgtaattgcgtattagcagcagcagccagagcaatagccaagggtcaattaactcccagtccagtgttcagttcatgattgtccatgcattaagagccaaagcacccccaaagccatctcaccctgctgaagcagtctaaagtgctcaactaagttggtgcattaatctctagaccagaggtcagcagacgttttctgtaaagggccagacagcaaacattttaggtctctgttgcaactactcagctttgcccttgtgaatgaaagcagccaagacaatatgtaaatgaatgggcgtggccagatttcatccacaggggttccctgctttagactgtgccgagagccagaggtcttgagttcaagtcccagcctcaccacactgcaagggtgttcttgagcaagtcaggaaggctccccagagtcaggcccttagcctctaaaaatgggaataataatgcctccctcaagagctggtgagacaatggaagctgtttgtaaactgtaaagtaccgtgcctgatttggttattagtgttttattgctgatgtacggtcgaggtccaggccacccgtggtagataaaagtgcatgtgggctggacgaagtggctcacgcctgtaatcccagcactttgggaggccgaggcaggtggatcacctgaggctgggagttcgagactagcctgaccaacatggagaaaccccgtctctactaaaaatacaaaattagccaggcatggtggcacatgcctataatcccagctactcgggaggctgaggcaggagaatcgcttgaacctgggaggcagaggttgcggtgagccgagatcgcgccactgtcacccagccgagatcgcctgggtgacagagtgagactccatctcaaaaaaaaaaaaagttcatgtgcccttggtgtaaaatactgggctctatctcaccgtctctgctgtctgcagttgcattatgaaatcaggaaagggttatttaatttcaatcactttcaacttgttttggggtatgagaaacacaccagcctctgaaagcttcccgttgctgtcatgtgatgtttctctagccacgaagccttgtgtagtctgagttgatcttcattctgaaaatggcaaatgaacagaatgaccatgatgaatgggggctcctgagaaacacagcactcgttctcagtgtctcaggctgggggagtgaagcctgcagccttgatggagggaaggtatgtggaaaatgaattgctgagcggaatctcagagaatggctgctgaagaaaagcatttcaaggagcaattatgcagctcattaagatgcactccattccggcctctgatcctaggggaattgtcagagcaattatgtgcaaacctcaattttgaggtctgaaaaggggttggtgcataatcggcaggagaagaaaaagaagggagacggtttgaaacaatgggtattaaatgattgtcacagcaaggaagacagggatggaaggagtggacaccctgggtacttaagactgaatgtgtggtctcaggattgcatacgggccatgtgggcagtgcatttggtacccttaataggacttcttggaatcaaagtggtttgctttgtacaaagttgtaagcatggtgtttgggatatgtttgttgaatgaatgaatgatttgtgcttgccatatcaaatgaatgaagggaaaaatgaatgaagaagttaaaaaggttaagaattcatgtaaaatgaagataataatcatacataccttacacgactactgtgagaatgaggtggtataatgcacttaaagctgtcagcacagagcctgacagtggcaggctctcaattctagctagtattgggattacattttcccaggtgtgttagtcagctcagactgccataacaacataccacggactgggtggcttgaacaacagacatttgttgactcgggtcttggaggctggaaacccaagatccaggtgccagtaaggttggtttctggtgagcctctctttttggctcacagacggccacctttttggctgtgtcctcacatggtctttccacggtgcccgtgcactcctggtttctcttcttataaggacacggtcattctgggttagggtcccgcctttatgacctcatttaaccctaattacctcttcaaaggcctcatctccaaatacagtcacattggaggatagagcttcaacatacaaattttgggggacccacctcattccataacaccaggtgaagaatcagactttgctattgaggttattaggcctgatcttgtgactaagcagctatgcaaaaccttttaaagccactagaatcactgtttcctgagatgccaaactggagatgccccagtgttctagaaaagcaaatagacttccagtaacttatgtccttctgtgttagtgcctgactctgctattcagagatgccagtgaccatcctttttctttttctttttctgagacggagtttcgctcttgtcgcccaggctggagtacaatggcttggtgtcaggtcactgcaacctctgcctcccgggttcaagcgattctcctgcctcagcctcctgagtacctgggattacatgtgcccaccaccatgcctggctcatttttgtgtttttagtagagatggggtttcaccatgttggccaggctggtcttgaactcctgacctcaggcgatccgcccgccttggcctcccaaagtgctgagattacaggcatgagccaccacgcccagctggccatcctttttctttccactgttaagacaaacaggcaactcactcatgctgtttttctgaaaaaagcaaaatttctgaactgtcttcttaaggattccataaaacaggtgccctgggagttgaaattgaccatgtgaacctgtgattttgtgtcagagtgagcactactaaatctcattttcttccctgtcttctttttcatttccaaatctgcccagaagacagtaaaagctcattaatttgaaccctgctaatttagaatatgtaacatttcctccaagctcaccatgaaggaggaatttgtgaaacaaattaatagtgtgaacataattagaaaagatgagtcttgtagtgttgggaggtacctggaggtgatccagtccttttcattggtggcttgtttcttttcaaatgaggaaatcgaggcccagtgaggttctgtggctcttccacactcacacagggggactgtttaacctccttcaggacaccagcctaaaacacggagtcttatttgtttgtgaaagacacaggctctttattagctgtgggttccttttacaatgtgaacctcaagtactaaaagtgcatttttaaagaaatattctgcatttcaggtttcccactaattatgactggccttctcccaagttagtttgagctattttggtgaggttttatagtgatttaataagaaaagcttttttaaaacctcataaaaccttctgtacaattcattctgaccaacattccctcttacaattatgtcattaacaacttctttttaaaagaccagaacttttgtctattcatgttaaccttaaaagcagcattcaccgaacccctgagaaacaaggagagctataatactttacaggattggggcagagcacatgaaatcatgtgtgagagagggttctgtacatttgtttttcttaattgccatttctgacttgggcagcctccccacccaaaaaaaaaaaaaaaaaaacatggtcaaaatatacttgtgcatgtaaatgtggtatttcctgggagagtcctgagggaatggcctgttttccatgtgatttgttttttaatagacttgatttttttttttagagcagttttaggttcatggcaaaatcgagcagaaggcacagaaaattcccagacacccctgcccccagacatgcacggcctcccccgtcatcagcatcctccactgaagtggtccatttgttacaactgatgaacctgtattgacatgtctttgtcacccaggctcacagtttacattagggttcactgttggtgttgtatattctacaggtttggacatgtagccacgtgtcattatacattttagagtagtttcactgcccccaaaatcctgtgggtctacctgtccatccctccctccccccaagcactggcaacccctgatctttttactgtctccatagttttgtcttttccagaatgtcatatagttggaatacaatatgtagccttttcagagtggcgtctttcactttgtaatatgcatttacattttctccatgtctttgcatggcttgatggctcgtttctttttagtactgaatattccattgtctggatggaacacagtttgtttatccagtcacctactgcaggacatcttggttgcttccaagttttggcaattaagaataaagctgctctaaacatccatgcgcaggttttttgtgtggatgtaagttttcaactcctctgagtaaataccaaggagagtgattgctggatcctatggtaggagtatgttgactgtttaaaaaaatttaatgagatgcctatttattaatttaaatcaaactgtagctgccgcatggactggaatgtcctcatcagcagatcagcgcatactctccccagagtcagacctactggggcaccaaaccgcaatcaacaggttattcaacaagcgcaggttcagagcccccagcaagatggccagaattactaagtgttccttagccttgggacatgaattctctgccacagccacagccaacaagaatggagcactcccaagtatttgacgggcttcttattctctccttttgggcatttaatacatctttaacacaaatcaggattgtagaagattagggcttattttcaaagtgtcttctcagcataaagtcagatgatgatgatgatgatggtggtggtggaggatgacagaattagcaggtggtgggtgtggtggtgataactagcagcagcagcagtggcaggactggtggtaattattgttgttaacatttcttgaacactcgctctgtgctttacacacattatttcaatcatcacaactctttaaggcagacactctgtttgacagatgacaatgccaaggcccaaagaagttaatcactttcctaaggtcacacagctggcatgtgatagcagcgggaggtaatccccagccatctaatgcccttatccccttccccgctgcctggcacagtgctctaagtctctatctgccaaggcttttagaagtcatttgatgcacggagtgatgtatctcagggccccgacattcgccattaaacccgaggtcaggagacaggagactgcagttgtcctgcttaatcccaacggtcccgttcttcctgtgtttcttttaagggatttctctccagcctcacaaatgctgacaggtggcccctcaccccacagggctcgctgactgcacgtgcccagaccatctcttcaggttccattttttacattcaagagaagaaaaagggcaaaagatttctattttaagctgtcagacacaacatgagcctatcaagacttgttgagcttggaagcagttccagcttcttcctcagaaagcagaaattttgactttgggccactgatgctcagtgaaatgtgtttccgttgtccagggtaacgtggcgttgaattccgctgacagaagaggctctgcatcggctctaatgagcagcatcatttcaatagagctggcccctccctccctcttcagcctcatcttgggcccctctattccttccagccctccaggccttggtttagttcctctgctgtccttgctttttcctgccaccgggcctttgcacctgctgttctttctgcttcacctctacttggctgactccttctcagcctttagggtctctagggctggtcacatgttcctctaatacccttgcctctctttgagagccctttgcttattgtaattattttatgactttctggttatttatttattgctgtcttcctcattggatgctaaggtccacgctggctgcctctgtgctggctttgtgcctaatgtactacatgaaacaagggggagctggatggatggacaagctgggagcctcagggtgaggataacggcaccccaagcttcctaagagcttagtcttctggctagtctactcaatgcctcattctaaacgatctagagttgcaaattgcacaggggttaagagcaagtgctctagaatcaggctgcctgcatttgtattccagccctgcctcttactagctgtatttgtttctcttgctgggtaacaaatcacacaaacttagcagtttacgacaacatactttttttaaatcccacagttttgatgagccaggagtctgagtatcttttaactgggtcctctacttaggatctcaccaggctacagtctcatgtgaagcttagggtccttgaagctcacatggttgttggcagaaattgtttccttgtagccatagaactcacagtggcttgcttcttcaaggccaagaggacagtctctctgagttcagagaaggttaagccctctttaaagtacagatgccccttgacttacaatgggcttatttcttcataattctaagttgaaaatatcataagtcaaaaatgcatttggccagtcacagtggctcatgcctataatcccaacactttgggaggccgaggcaggcagatcacttgaggccaggagtttgaggccaacttggctaacatggtgaaatcccatctctactaaaaatacaaaatttaactgggtgtggtggcacgcacctgtaatcccagctactcaggaggctgaggcagaagaattgcttgaacccaggaggtggaggttgcagtgagctgaggtcgcggcactgcactccagcctgggcaagagttaatgggactccatctcaaaattttttttaaaaatgcatttaatacacttaacctatgaaacatcacagcttagtgcagcctaccttaaacatgctcagaataccaacattagcctacagttgggcaacattatctagcacaaagcttattttataataaagttatcttgaagaattttgaatcagatttaaagccaacccattgttaagttggagattgtcttacttattccctggttaggttagccgcatccaggataatttttccttttgattaatacgtaactcacttacggatcttagttatatctgcaaatcccttcgcccttgctgtgtaatataacataaccgtgaagtgatatcccctcacatccccaggtcctgtccacactcaaagggtattgtacaggacatgtataccaggagcaggaatcaccaggaccatcttagaattctgcctaccacactagctgtgtggctttggggaagttgcttaacttctgtgtgccgctgtctgtagagtaatacccacttcataggatttgttgtaaaggttaaacaagttgatttatggaaagtgcttaagacaattcctggcaggtggtgagtactcaataaatgttagctgttacaaccataaagatgaggataatctccagccgagccagtgggctcccagcttagaaatgcagtccaccaactggctggaaaatgaaatccgagaagccaggctgacggggaaagaagacaccagagaatatcaatgacttggtaaattggccttcccgaaagggaaactgacagcttctactccaccaggcgaaaatgggcaaagcaggtggaaagctgtatcaagttactaaagcaaattggatctacgtgggtgcacgtgcccctattttagttcgtttcatgaaaacatctcttctcaaggcaaggagtcatggcctcatctctctggaaagctttgaaatcccttacatcagggatttaaatcaattgatatctctcagatatgaagaaatgagcataattggatatcctggcaacttgtgtcagcagctgcaccccaaagtttatgtctgccttaagggaaggctttcttctgaaacaggatctcagttggttcagtttaagaataagggcctctcattaacactagtgagacccctaataacgtgaacagggttattaggtctcactgacgtgtggtcaggaggaggcccgcctgggaatttgccccacgaagtgtgcgttttgctggagaggagagtgttcagaatcgatttgttgctccgtctgggatgctgttaaccaaatgtgggaagaagcagcacagtgagtcaatggagcaagttcgcagtggcgtatttatgaatactggctggttgggggagaggaatggtgcagcttctttctttggaagggactcgctttattgaaatccttttcagtggggtcacccggggcaagtcattcactcttcctcagacctcatagtttgcatctgataattcaactcaagtcattttattgacggtggtagcggaccctgttggtgctgtgcccagaccatccgttttagggtttctggcctctcatcccccagcgtctatgtgctttccctctaatggctgcctgcacctgcgacttgctttccgaggccacctttgagctacaagagctgcttctcccatgcccagagatgggaaggaggctgggaagttacctcttcatgggggaccctcagcctggctcccttaagtcaggacaaattcagaggagtaaagttatgttccagagctccccatgggatcagaattaagcctggcatgaaggcctgaattccatccttgctggggcctctccacctccctttgctctcaggactggctacatgatttgcaggactcagtgctgaatgaaaatgcaaggccccttgttaaaaaatgattaagaattttaaaacaacagtgacagcagagcctaaaacctaacctaagacccttctgattgcagggtcggagccacggcacaggttgcacaactacgaagctgggcctccctgctccccaactttcccgggagctcccccttattcagtcccttgcatgtgaactcatgtcttgtactccgctctgatgaacctgacttaaggccactgttgaggcacaatgctgaggggctggattctacagtagatacaacaccaacccttccctcgaggggccgactctttagcagggaagacagatgtaggcacagatcatcctgtcacagactgtgaagcagagccccgtccccgaggtgtctgcaatgtggggaggtgatgctgcctgggaacacgagacctcctggattccaggccagggttccgtcttctgccccaaatgatggatgaatagaattgggggtgatgatatgggggaaggatggggcaccacttcagaagagcacagcgcaagcagaggtgtagtggggggacttccatttagtttgcaggagcctacctgtgctcagtacagaagacttgaatttgaaaagtccaagttcctgcccccaggtggttcacaagagatgcgtacaaccagctctggtggaattctgtgcaagggaagtgccgagctaacggggatgaggcgaagtgctagatacaagaggagcctggtctcctaagaagttcccactaggtgttaggagtcctagagcttctcatcaaagaaaagattctctaactgtggaatttcagaaattggcaagctgtcagggttggtctgggggaggagggaacctcctgaaatcactttatgtgatgggttcctccatccgctcaaacgggtttcttagttttagcccatcagtctgctgaggtgaaattaagttctcttccaagtttgttatctgaaatgaccctgggtccgtcagtactgcagctgcaccctgacctgggctggtgacagtgctctgcaggaggcgcccactcgttcccggtcctcctccgggaggagcccacagacaccacactggtttcccagtacactgaagctatcgctgacgttaaggagcctcttctaagctgggaaatgtgggcagctggctgcggtcctccctggagggggtgagggaaggtgttggtgaaacgcttgtggttctcaggggccctgggaaactcttttctttatcatcgactttgtcaggctgaagccatctctcatttttcagagcatgctcatgggcagggagggtgagagctcttccatccgggaataagtttataaatgcacgaaagcagctgggctttgccgggaagcaggatgagggggctgccctgggtttgatgttgtgctctcttctaatgctggaaatattcagctgctcctgggttggatgtgagcaccaactgaggctggctcataattcttccttgacaaatgcctcatttgggacaataactcatgatttcttcactgcctcctattaagcaattaaaagaaggcacacattattctatgaatatatatgatcaaatgattttaaattattgagtggtgttggaagccagagaacagtgagggaaagaactgcatgtgctcctctccctctgtcttttttttttttttttttttgagatggagtctcactctgtcacccaggctgaagttcagtcgcgtgatctcggctcactgcaacctctgtctcttgggttcaggcaattctcgtacctcagcctcccgagtagctgggattacaggtgcccgccaccacactcggctcatttttttgtatttttagtagagacatggtttcaccatgttggccaggctggtcttgaactcctgaccaggagttccgcctgcctcggcctcccaaagtgctgggattacaggcatgagccacaccgtgcccagcctctccctcttgtcctgttttagaattttattttattttttagtcaggcttcagaagggccctggaacatggctctgtgtgatctggcccctgcctacctctgccacatctcagagccctctgtcccacagctgcatcttcctgtcctctgccactcccagctccccctgccccacctctctgttccctctgcctggagcatcctccacattctttctaggggaccctggtgcccccagctagcttaggtcctctcctattcccttcccttgacttttgcttttcttttatagcacttcattcaacaaatattttttcagtacttactatgccaggctgttgtgacatagcaattaacaaaacagacacaaagctcggtccttatagaactggtaatctaagctcattgccattgtgttgatgagtaattattcagcaattggtttgttaacttgtcttctccactagactggaagctccatgaggacagggccatatctgtctcgttcacagtaccatgaatccccagtgcatagtaggcactcagtaggttcctggggaatgaaagacattctgggattgatggctgccatttggccatctaggctctctgaggtagctgcatcttccttgggaatccagaggtcgtcatgtggaattacctcctcaagactgaattacacagcctgttagagggaatataagaggagccgagctggctccaccacagggctgccgggcctggagctggtccctgaagaactccagggcccgcaggatgctcacggtttgtcctttgccacgtgcccgacacgtctcgcaccatttccaaaccgctcctcgagggtctctcccctcttcaacttctgtgtatttttgcacttacaacttcttggggtcattttactttatgtcaaatatatactggctgggtgatcatgtcagggccctttacttgccctgaggcacctcttctaggtgtcaagaggggtcttccctgtttggggttagctgagcaacttctgtttcaccattgcttttaacccagggctagtggcttcctactgatgtcttcagaccaggcattaacctcttaaaaaccccacaccttcagctgaaaaacagatcatcactgtcctcaacaatatgcatttgctccatttactcctggggttgtccatttggctgttcattcattcatttgttgagtcattcatcaagggaaggagggaggaagggagggagggattggggccaggactaggtaaggcaagctgggctcctgggttgcagaatttaaggcagcattcaccctcaggaccaggcaagtgcagagtcagcagtcctgttcctgggtatggagtcctgtcctgcccccgtacccagcttcattctcctttgagatttcatttgtcacaaaagcctttcactaggtgatgaccaagctccaaaggtgaccccaggtaacccacgaggggcctccgcacaccctcacatcacctccccaccatgtccaagctttgtatgtagcaaaagtctgtgaaagacagcgtgggagggaagtgagactctccacattttcaggaataaaaagtacatttttacacttacttgattacttaaaggccccatctatcgcaaatgttgcctggccttccggtggcacacgcccggggcttccagtgttttgatataaacccagacccttaagaagatgtaattgccggttgtcttacaagcagtcatctcatcacaggggggttggaaggagaattcaggagccaaacagccgcaagagcacctggcagatccagttccgctggatgatgtctttgaacaagactaaaaatgactgtgttgatggcttcgccgttttccaacatttggtggaatgacagagccttaggacatgtctgtagccacatctgccatctctgacatcaactgagtgttactaattcccattcctctcttttaatgaaggaagagttcatcagtgctggtctcatccaaagaagcaaattagggagtctgttctttgcaaatgttggggcgtggttggtgattgctcagtggagaagcagctgctggtgatcaagtcctctgtgttcaccagaccccagtatgtacaactattatgtatccataataattacaaattaaaaaagaaaacagctcccaggccaacacacaacaccgccttaatgaacatcattgtcattcaacctgtgtagttttcattccggacaggatgggctgctggatgcagtacaatttaatactattataattaacatttacagagtgtatattatgtactataagcttgccatgaggtttgactctggattgtgaccatgatcacccccattttacagatgtggctattgaggcctggagagttcagtggctgatccaggttacacagtagggctgtggcagaggccagatcagatccaagcattggcctcccgtgtcctcatttctgtgttgttcagtgtcctcagacatcccgctccatttctttgttcaacgctaccaccctctaccctggccagactgggttcctctctaactcaaagacacatgatgggacacacagtgctttacagggaaggacagtggaggccaggagagagaaggctgaaccaaagaaacttcctaaggctcaactgtttatacagttctctccgtctgttctccatgttctctccatcagcctctgaggagctcgaagctcctgtaaaagtccttggccctttaggtgcgctctggtaccgtctttctctatggcaccttttgtggccttcaggtaaagagccaagaaggaacaccccttttatttccccttgatttttgtgccgtttatttatttatcagtattgtctagccttttaagagcctggatgtgagtctcggctctgctactttgcagctgtgtgaccttgggcaagtgacttaacctctctgtgccttggtttctttatctgtaaaatgggataatagtatctagctcatggtattgttgtaagaatcaaaggagctaatcaaagtaaggcacttagagcatgaccaatatatattaataggaggctcacaaaaaaatctagctcttactgcaactcctactactcctattttttttttttaaaacaacttttatttttgcacccctgtactggaatagatgatcttgggcctggtttctgtaagcaacactgactgtcatcatctgtaaggataagcacttagtgactaaactgaaatctccaagtcttgcttttaaaaaagaaagacccttggctggctaggcacagtggctcacacctgtaatcccagcattttgggaggctgaggcaggtggattgcttgatcccaggagtttgagaccagcctggccaacatggtgaaacctcatgtctactaaaaatacaaaaaaatgagctgggtgtggtggcacgcacttgtagtcccagctacttaggaggctgaggtaggaggatcacctgagcctggaagttgaggctgcagtgagctgtgattgcaccaacagcattccagcctgggccatgggagtgagaccctgtaaaaaaaaaaaaaaaaaaaaaaaaaaaaaaaaagggggttgggggaggggggagggatagcattaggagatatacctaatgctaaatgatgagttaatgggtgcagcacaccaacatggcacatgtatacatatgtaacaaacctgcacgttgtgcacatgtatcctaaaacttaaagtataataataatttttaaaaaaaccacaaaaacctttggctacaaaatgcccagcctgtatccagattaaaatctgtgtgagacctttctatggcttccttcctgttgcacttagaataaaatgcaaagtctctaacaacgtccatgagggccccgccactagcccctgcctgccttccaccctggcactcaaagctggtcacttccctgttccccactgagacttggattttgttgccggagagactgcatctgctgtcccctttgagtggaactcttgctctgaccttcaacccatctggtcacgtacatgcacttggtctgcttcctgctcagcaggactcagcaaaatgatcatctcctcccttctccctttgccgcacccccccaccccaaatcaggtgtccatgtcacaagctcccggcacttctctttctgtgtctgggtcctgccaggctggaacctctatgaggacagggactccttacaaaattcaccaccacctcctcagtgcctagcacaggtcctggcatagagcaggctctctcagctgagcaactcaaggaggcacaagcaccaggcaatggtttaccagtggtatgttgtgacctattgtaaaatgggtcttccgggtcataaccaaccttggaagcaggggaaaaggaggaggagaaaggaggagcaaaatgagaaggagctggaggaaaagaaggaggaagagagaaagaaaaagaacagaacaaaacaaaatagaaaatatcagaagacattgcatgtgaaaggagaaaaatattgtctcgtaagactttcattttgtatatgtgtgaacagatgtgtgtgtgtgtgtgtgtgaagttgtacaatatgttcttactataggttgaagtaaaaaagaaaaaggtgggaaagttacctgacttaaagtgtgatgatattagcaataggtgtcaaccacttgactcaacctgaactcctgcccttcccaatggagtgggatgggaaaatgcagtcagcatccaactgccacttgaattaccaacatccactactctcatgataaagggtgtacgtgggggtgatttgggtagtgggcaggatagggtattgtgaggtaagggttggggtaacaaaaaatagccttgcatttctgccagaaatccccttctttaagcctgctaactttgcagaagaatgggtgtgggacatttgtctcaagttccttatcctgtgttgctttggctgaaatctccgatgaatatgtgcagcttacctaaaggaagaatttctctatctgaatggatccaggtcctgcaacttctttcatagggtataactttagttttcagccgctttttttctgcttcctagaactcgaaaggtacaggcagtctgcaaagtgcagtggcttttgagttgaacaaatcccaaataccagtggcaggcacagatcccaaaagctgcgcatgtggcttttctcctggcacttgagctgagattgtctcttttagaaatgtcagcttgggagtgggaagcttgaaaatgtcagtcttgctagtctgtggcttggtgacttttaggaactggggttctcagaattgcatgtgcctttccatgacctttgttagaaacgtatgccatcctggagtttgcagggcatgtggcaggaacttctgattaatatgctttgaaattcaggtctggagtcacataacccatgttggcatttctggtatcagttcacatagtttgaagtataataagacatacttgtgtattacaggttgaagattaagatggcaaaatactttaacaccactggtcacagcccaaggactatatataaatagcatcaatcctaaaggccccaaactggaaacaaatgtccataagcttgtgaatggatacacaaaatatggtatatccatacaattgatacccaaccacattagtttgcctacacacagtaagccaatcactgtgatgatggattttcctaaagagaagtaattttttcatgaggcagccaagctaggaggtaggagaacaggtctcaaatctgccttcccaaagatgggattttagggatctttatgggatagaggagcaaggtggcctgaggcatggggaaaggcgattgtgggtaagagaacatgaggtaattggcaatccatgcatacgtggtcaagcttcattgcccttcacggaataagagttcagaaaatggtggcattaacatgatctgagggagtagtgtttggccctctgatgtcaaaaggtcacctctcatgcctttgtgcaggcccagttggaggtcggtggtctcaaccagcttgtgtttgcaaaacacatacctaaaaaaagactcatataccaaatatacagagaactcttaaattcaacaataagagaacaaacagcccagttaaaaatgggtgaaagatacaaacagatgtcgccaaaggagatctacagatggcaagtaagcataagaaaggatgctctacatcatatgtcgttagggaattacaaattaaaacaaaaatgaaataacacttaatacctattagaatgtctaaaatccaaaacaccagcaacaccaaatgctggtgaagacatggagtaacagaaatctcattcactgcgggtggaaatgcaaaatgatacagcccttttggaagacagtttggcagtttcttatgaaactaaacatcctcttatcatgtgatccagcagttgcactccttagtatttactcaaatgagctaaaaacttatgtatccacaaaaatctgcacacaaatgtttatggcagctttattcataattgccaaaacttggaagctaccatgatacccttatacaggtgaagggataaacacactatgatgcatccatacaacagaatattattcagcaatcagaaatatgccatccagccacaaaaagatatggaggaacctgaagtgcatattactaagtgaaagaagtcaatctgaaaaggctacgttctgtatgattccaactatatgacattctgtaaaagttggcaaatgtctgtaaacagcagtaaatgactatgggggcagtaaaaagatcagtggttgccagggtttcaggaggtggggagagggatgaacaggaagagcacaagggatttttaggacagaaaactactctatgcaatgctttaatggtggatacatgacattacacaaagaatgaagtctaatgtaaactatggacttcaattaataagaatgcattgacagtggctcatcagtcacaacatatgtaccacaccaatgcaagatattaatgatagggacaggaggcagggaaattctgggcagaagagggttggtccccagcgaggtccctaccctcaagctgaaaagcctaatactgtagcccaaagtgagaccttacatccctgttttcccgctcaaatgttgcctgccccgacccccatcctgtgcccataaataccccaggctcagccaacagagaggggagaagcagctggacattggagactacagttggatgtcagaagcagcttgacttcagagggacagcttgatggcatagctttagagatgagtccaatcggggaccactggactccaggggaaaattaccttcccactccttcccctttttagctccccttcctgctgaaagccactttcactggcaataaaatcccccacattggccatcttcaagtcatttgtgtgacctcattcctcctggatgccagacaagaactcaggtgccacaaatgtgaatgcaaaagggtgtctgtcacatggaccatccactgagctgttaacacttaatctgtccatggatggcaaagctaaaagggcactgtaacacttcttccggggcttcaggggtcatggacaccctcccctagatgctgccacagggtcagtacagagttcgctcttgctggcacccaaaagcgttcacccccacctcctgcacccattcacctgtgttccccctcctctgaggggtggaacagtgagtgagtggaatttgcccctgccagcacccatgtactccagttcctgcctgcaaaggggtcagggaagtatcctgcttcattaataatgggaaactgggggttaaggtatgagtgtatgtatatggaagctctatatactttccactcaatttttctgtcaacctaaaactgctcaaaaaagagaatctattaatttaattaaaaacaaaactgggtggaccctacccaccttcctaccagcaaacatgagaaggaggatggctgttccccagtgctgacgggggcactcaaccttctgggggcaatttagcaatggataagaaaataaaaagtctgtaatcaccttgatctggcacttctaggagtttatcctaaagccatggttctcaaccaggggggattttgcaccccatccaccccagggaggacatttggcaacatccgaagatagttttgattgtcagagctggggagctgctactgtcctctagtgggttgaggccagggatgctgctgaacgtcctatggtgcacaggacaatccttacaacagagtcatctgatcctgtacgtcattagtgacacttctgagaagcccaaatgaggaactgggtaggtacatagtactcatctcagtattgttcacagtagtgagaaattagaaatgatcaaaatatcatgtggcagtaattaaaggatggtatatccatactatgggatcctgtgcagcctttagaatggcagtatgggagtatgatctctaatatgaaaaaaaatgctcatgagacatacatgaaaaaaattacaaagcgacatgcatagaagaattgtatcattgtaaagacagagtacctatgcgcatttctttttttactttttacaaattaatttgatttttttaaattttgagacaaggtcttgctgtgtcgcccaggctggagtgcagtggcgcaatcgtggcttactgcagcttcatcctcccaggctcaagcagtcctcccacttcagcctcctcagtagctgggactacaggcgtgtgccaccatgcctggctaatttttgtatttttgtagagatgggatttcaccatgttgcccaggctggcctagaactcctgggcccaagcgatcctcctgcctcagcgttcacaagtgttagtattacagctatgagccactacacccagcctgttatgtatctctgagaagacacataacaaaatctcaagcctgtgtctaggtggttggaatataggtggtttttaacttttaaaattattttggggatttagatttttttttttacaatgaacatttattacttttataattaaaacaagaatactttttaaaattaagaaattatgcaactagatatgtagtcaagtagaggttgcttaaatactaaggtttattttcaactactaattactttcaaaagtattttaaggaacacattgtcataccaattagatgcccactacatgcaggttttgtacatttcatttacttctcaaaaagccgtgttgtaggctgggcatggtggtgcacacctgtaatgccagcactttgggaggctgaggcgggaggatcactcgaggctgggagttcaagactagcctgggcaacatagtgagacccctgtctctacaaaaaaattaaaaaattagctgggcatgacggcacatgcctgtagtcccagctacttgtgggaggctgaggcgggaggatagcttgagcccaaaaatttgaggctgtagtgagctatgattgtgccactgtgttccagcctaggcaatagaacaagaccctatctcttaaaacaaagcaaaacaaaaaaccgcaaaccttgttgttgctcctcaccacccattttagagatgaggaagcagaagtttggagggttagatacgtcagatgcagagatggggttctaccctgtgttttcaaagtccaagtctttccctctgtaccatggtaggggcagtgtgccactgtagtgggtagcgtgtttgtgtgggattatcagtaacagatttcttccaatatgctcttttcaagaactccagcacatttaggggatttccatttgaggaacttaagaggacattcagagactttttcttcacacacacacacacacacacaaagttctcatgacttttttttgttgttgcacttgaggagtttttcctatctggaaaattcctttgcctggaatggcttattctagatcagggatggaaacatcagttgtgcctgagaatctggtctgggtctcatgagcgtgttttccagctcctggaaagccaagacttcactgttttaacccagggtaagaagggacctctctagaacatttctcagctgtcatctcataaagagacttgtcaaacctgattcctctggtaccaagaggaagcaatttgaattttcttatttcctctggagtttaggggtgcagttagcaaacaaaggaacctcttaggtctctctgcctttgctatctgctagtggagactgcttttcttggacggtttctgcaaggagctgtccggccagttgtggattggctcacgggatggagaactgcttcctctgaagagagggacttctgcttcctcctcactgtgcttattgctgctcagaggctgctgggaaatctctgccgcagccaccctcccagcgtgcacctcctggatatctgtccatggaagctcctggacaccccctaccttccctgcatctgggtggactcccgcatgcacttgctgcatttcgtctcaggttgccttttgactctccaccgcttatgattccactcggtggcctccctactgatgtctttcctcagccatcttgtaagtggtttctccttggttccagccctcactgaggccagattctgtttcctgccttcagtgtctaacgtgtggccaatcctctttcttcaaaggcagagtggccctgcttgcatctgccaaaaagacacacctgggctccctgcagctggcgtggtgctgcctgggcatcctgccaagccagcatgccctctttctaggggagctttcctgcttctggttttcaaatccttgaagcagcactggggaggcgatgaagagggtcaggtttggagtctctggctgagtcctggccctggccctggcaggcagagtgcagctggggtggttctgtctcagagcccggtggcagactgaccagtgtaggtaggggaagactggctggacctccatctcagatctgtcccttgaaagtagggttgggatgagaccccttagaggcttcagtctggaagatagtgcaggagcagagctggtaggatttgctgtagagaccagccctgtgctggaacaggcccatggcttatctgcatgaaacctgaggacagatcactgcagcgagccttcttccactttttttgttttgttttgttttttgagacagagtcttgcactgtcatccaggctggagtacagtggcatgatggctcactgcaagctcttcctcccagattcacgccattctcctgcctcagcctcccaagtagctgggactacaggcacccgccaccacgcccggctaattttttgtatttttagtagagacggggtttcaccatgttagccaggatggtctcgatctcctgacctcgtgatctgcccacctcggcctcccaaagtgctgggattacaggcgtgagccaccacgcccggccttccacttttaaattaataataatagttcccatggttggagggcacccactctgagccaggtacttggcaataatcctctgaggtggaatctgtgattctcatccccaccatacaggtgaggaaactgaggctcaggaagttaaagaactgacccaacagagagccagggggctgggccaggactggagctcaggcctcctattctgctttgcaagaaatatttgtgttggaagcccagctgggcttgttggaaaagcaacctgcaggtgggggtgggcaccgcagttgtctttattttggccccttctgagtttgctgtttgtctgcctgggctctggggggcccttcccacccactcaccttcccctgctggtcctggcctccaagggctccaagtccttcccccccaccctccccttggcttagctgtggactaatcccttttcccattaggtgagccaagacaagattagagctttattaaaaggaaattaaactaggaaatgaaaggataaacaaacctcaaacaagaaaaaacaacagcaccaaataagatgagttgacagagcaccactctttatcctaaagggtatccatctacctacaaattagggtgtggctcccagtggggccatcatctcttcttccaccctcaccagctctgcctgtcatgatcaagctcgtcatcatggtggcttcagcaaacatgttctttggggaccttggtgatggcaccatactctccagcgctttgctcacactagcccctcccctgatttctttctgagtcccgcatgcaggatgctgccggctcagccagtgcctccctggtgaatggacccaggtaatggctcccatgctggcttcccctacaggggagaagttgcatttcatatcctctattccactttccagggccctgcgagatccactccccgcatcccgttagtctgccctccttccatgcctcgcttccaccccactttctcctcctccttttctctcttgctgcaacctcttggtggcctttgctggcagtgttcctcctctcacctccacttcacttggccaacacctacttagtcttcagaccttgtcttaaatgttgctttctcagggtacctttccctaacctccctaaactgatttctcatggaaccctggagttcaccttcatcgtagtggtgattaaaccattatttctggccgggtgcagtggctcacccctgtaatcccagcactttgggaggccgaggtgggtggatcacgaggtcaagagatcaagaccatcctggccaacacggtgaaacctcacctctactaaaaatacaaaaaatagctgggcatggtggcacgtgcctgtagtcccagctagttgactacagaggttgcagtgagccgagattgcgccactgcactccaacctggcgacagagcaagactccgtctcaaaaagacaaaataacttattatttcctttgcacccctctcccgtcccagactctaagctcagtgaagaccaggaccaatgtgccaggctcagcgctgaatcatcagagcctaaagtgtctgataaatactacttattcattcatccattcatttactcaatcattcattccacagataatccctgagtgcttattctgtgctgggtaccatgctagttgctgaggatacaacagtgagcaaagccaagtacctgctgtcagaccagccactcattctgtgtgtgttcaataagtgatcaacaggaagaggaatgcctattcattctcacatacacttttaatgatgagcattgccagccaatagactggctgcctcatgtggaggtgagctccccatcacaggaagtattcaataagatcctggataagaaagagcccattgtcatgatgctgcaagtggaggctcctgaaggtccctcttacctccacgattctctggttctctggaggatgccatcgggtggctgctgttgtgtggctgtcagagtccggcagcagcatgcaaggtagacatctttgttttttcctgatggaagccaactggcttctcttgaaaaccagagctaaacacttgcctttgatataaaataaattttcatttaaaaaatgccaggaaatctatttttttagctatatttttttcaaagaaaaatgatcattttggaaaacacagaaagactgaaaggaaaattggaaggactttaattcctctactcaaaggtaattattgtaaacatttaacaatggcctttttgatgaatatataaaaatatacatttttttaaaaacaagatcacatattctatcttgttcctttcatttaaaagattgtgagtactttttactttgctaaatatcgtttcaaaataagatttttacctctgtgtgatatttccatatatatatgttatctattggtatgctctatccccccaaaagttagcagcttaacaataatcgtgatctctcctgatttctgtgggtcaggaatttgagagtggcttagttggacatgtgtggtgtggggtctgtggtttgggctgtagtcagatgttggctggggctgccatcatctgaagactggattggagctttcaaggtggtgccctcacatggttatcaagttcgtacttttccacgtggcctttccactagactgcttgagtgtccttacaacatggtggctgccttccccaagtgaacggtctgagagaaagaggcaggtggaggatatgccttttctatgacttggtctcagaagccacatgctgtcacttgcatggtattctgttggtcacataggtcaatctattgtgttttgagagcatgtgtacataaggtatgaatacaaggaggtgaagtttatttggagacacctcagaggctgactactgtgtatcctctttctgcaataattgcttcttcaccagtcccctcttgttgggtatctatattgtttccactgtttcactctcatagggcacgtacattcccgaaaaccttaggtacctgatgtggaacaagtgcctgatctacatttgaattcacttagtccaaccagagtttcaaagttacaacttaggagcagagtcattttggggccatacccaaagctgcctcccatttggaccattccctttaagcattttcacagaccatctcctgaagggatggtcatcgtggttcggtaggttagcaaggtctggcaggaaacaaaaatcaactcagagactctcatgaaggccccacttataaagatctgagcagggggctgggcatggtggctcatgcctataatcccagcactttgggaggttgaggcaggtggatcacttgcggtcaggagttcgagaccagcctggctaacatggagaaaccccatctctactaaaaatacaaaaaaaaattagccaggtgtggtggtgtgtacctgtaatcccagctactcgggaggccagggcaggagaatcacttgaacacaggaggtggaggttgcagtgagccgagatcacaccactgcattccagtctggacaacagagcgagactctcaaaaaaaatagaaaagaaagatctgagcagggactagcaaaccagcaagatctgaggcaccctgaaactggcaacagagatgagccattgtcaccctgaggcctgaagagccggggtgacagctgcctgaactgcagtggaagcaggggaaatacacccttactccaatcaacctccccttcctgcctctcttcctttctgtcctcttgctggttcctcctgttggccaaactgaaacagaggtcagccagctgccagcatggagcccggctgatgtaggatgggaatcagcctcagggatgggggaagcagagtagagaagggtggggaatggatggggctaggggtgggaaaatgagggaatgggaaagccaacacattcagtcaatattcttggaacatcattaagacacagaacagtgtatcggaacagaggttactgactcctgccctattgtagatctggggtaattttattattaataataatcttaacagcaatattagctatcctgtgttaagtcttttccatgtacagggcattgtattacattacagggcatttaacacatacaatttctaatctttacagccaatctgttaggcacatgttattatgagtctctttcaggcaaggaaaaatgagtttggaaaggctcagtatctgcctgaggtcacaaaatctgtagtagagctaggattaaactcaggtctgttttactctaaactccaagtgcttctgtctaaaagcagtctagaccaacctaagggggagtaggcgaaccaatgtggtttctgtatgaagctttcaatgccttcttccacagtggagcaataattttaaaaagaagaaggaagagaagaaaatctttagcatgccaactcatctgaacaactgcccaggagtcagagtatagtgtgtttggcaaattatgagttttgtgtcagtgcatacaaagtaggcaagaagtgaggaaaagatcccttgaaataatgggatggggaatgcagcactcagcatggtgagctcacataataaagtcaccttggagagctcagtaaattattgtgcagagactgctgctgatagacgaggcacactggcatccctcagtgcccctggtggctctgaaaacagtgccctggcagctctgggcacccaaagggcactccatcaattacttggttttagaagaaaatttcccccacagtgcagatggatggatgagagaaggattggcagaagtcagagagggcaggggagagggagagagttgcaacagaatgacattactttacacttggtattttgcaataatgaaaattacctactctatcttcagcactggatgtgtagcaaaaaatttaggaacttctctggtctatatcctttggatgcttcctgaaatggaaaagtggacttgatgagattgtgctggggaggtcacagggtggaggatgggctggagagtggccaaaagcccacagtctccaaagactttggcccaactcttgtgtcagcctctccttgagctgaagctggaacctgatgggtttggcggatttgtttgtgtttttctaccaggtagagaattatctgtttatacctcagaactctggatgccatgattgcaatacctcatcaaccctgagatgctcagatgcttgccaagttaatctcactgattagaacctatgtctatgagaggagtctctagaagggtcaccagaactctctgcttattcactttggagacgcgggcacagtgcgagggggagtgggacacaggagggaggaaatgatggtgggggtgggcagcccatgtgttcacaaagtctccagggcactaaagaggtgaccaggcacccatccaaggctttgctagccaatggacagttccacataggctggaattggaaatggaatttgatctgagcctaaaacgtgagaggcacaatagcacttggggtgaactttggcccaggatcctgcacacagcaggtgcttcctcagccagcattgctaagaaccttgccagtgtggaggtggttaagaatggggacgtgggagccagagggcctggatttgcatcctgccctctgtgatcctgggcaagtcacagataataatcaccctgcttcatgaggttgttgcaagtgttaaatgatttaatacttgtgaagagcttagcacatagtatttattagtcattattattatgtctaatttttagccccattttcaaatagccaagccaacctttgatacccagacgttttcaagaccctcagtctggtggcccaattgccgattcatctcctggtccaaagccatccagcacatcaccatcagattaatttctaaattaacctaaaactttgtgttcattgcttatttgcatttaaaaaattaataccagatgtaagagacctgatttgcaatttggcatcagttcacatgaagatgatctgtggcttctccctgaaaaagttaatatgagccaagaatgtgacactctggtttgtttctttggaagctgcttggatgcatataatgtaattaacaagtattgaacacctactctgttggaggtgccgtgccgttcatcactgcacacctcaacagtgttacccaccactgtttttcggaagaaaaacagcttaaataaaatattaccttggaaccctcgccaaaaggattggggtaggagtgggagaagcccagacctctcttgctcagcctctccttgacctgggggccagtcctgcttaggattctctggccttgacccctggtcactcctcctttgtgccttgagaagaactgaccagaagtgacccacccaaggccattctagaaggttctaaggaaacaaaaccagggcctatgattcccagcccagcaccctttttccttttcttgctttttattgctctttgcgcgtaattgtaaaaatgcctcctgctttctactgcctcttgatttctccccatctcagctcttgctaacccgacccattttcttttctcatgcatggatgctgctctgagaagctcccaatcgatgcatttgggaagatccccttgcagggttctccaactgcacctcatctaatagagttaacatttcgttctcattctttccttgcatgagccacagcccctgacttctgcatttcctggctgggtgacgttagacaaggaagatacttttcctgagcagggataattatacccacttagcaggcttgtgaggcacaaaggaggtggcttgtgtgactgtccctaatgcagtcgccgctccatgccacgttccatccttcccacccacccccagctcttagagactcaggaaaaatgtgaagattttttagtgttgtttaacaatcatttacattttcagtgcaatcaaacttgtagtttgatttagatgagaagaataactgccaaataaactaaaaatggcacggacaatgatggtaattgtcggcagcgggataattgatctaattacacaaaggaaagcagctccccgatgagttgagcccgtgggctcctgcaggcagcagctcaggccgtgtcccaggtcctgagtggctgtaagaaaatcagaagtttcaagacaaggtgaggagacagtcacgggagcagcatgtcttcaggcggaaattgttccaatttccccacaaatgatcactgatgtgtattttgctggactgcctctggagaacagagctcagatttggaatggtttagatgctattttattgcagctgtatttactgtttgctttcccagccatggtgaggaaagtggtacattcccaaggcccaagacagaggaagtgatttacaaacctagcccaggaagggccaccctgttcatcttgggggaagacccgaagccccaacagggctcccgggttgaaatgaagctgctaatggatgagtcttgttggtttcgatcctgacctctgtttgcctgtggaagctggcccaaggggccagtggctttgctcaggacagtctcatcctggccagcgaagagggaggctgccctgcttggcctctgctccctacacgctccctacacactccctacgcacatcttagtcaaactgcttcaccttgggcctaatgaccactcgttccatctagggaggcagtgagctttttttttaaattgtaaaaaacacataacctaaaatgtgccatcgtaaccatttttaagtgtacagttctgtagagctcagtaccttcacactgttgtgcaacagctcgccagagctgcttcatcttgcaacatggaatctctataccgtttgaacaataactccccatttctcctgcccgccagcctctcgtaaccaccattctactttctgtttctatgagtttgatgcttttagatacctcatataagtggattcatatagtatctgtccttttgtgactggcttatttcccttaacctaatgtcctcaggctcctccatgttgtaacatggtaggatttccgtctttgtaaggttgaatgatattccactggatatatgtactgcgttttctttctccattcatctgttcatagacatttggctttcttccaccagagtttacccttctttaacaagtactgagtacctactgcgtggtagacagtaccccattatcttagtgctaaaatgtgtactcatggaggggcagtatgagtgaatccgagtacctgagaggaaagaaaacaaacgccgtctcccactgagtgaaaactaaatgtggaccaccatcatagccaccccataatacaacagcccatgtttactgggcccttaccatgtgcctgacagtggtctgatgtctgtatttgtgtctccatcttatgtgatctcattcaatcattaacaaccctatatgcagaaaccttctccatcaacttaacattatctccagtgaggaacggaggctcgaggagattaagtgacctcccgagatcatgtagcaggtagtggcagaaccaggattcaaaccctggccatctggctctaggttcctgaactgcagatgcagtagttagactgaaaaacctcaaacgggtgctgtgcttctatttcacctgcagggggccaagattcttttcccagggtagtaaaacgtccccgacaccacctctgccccatggtctcgagcaagccgtagatatgtggttggtttcccagttgcagaatgtaatggaaccctgtatgggtgtcaggctgaagagggtcatcccacaagtattgagcacctcctatgtgctaggtgccggggatgcagaggtgatctagaaggcaaggccctgccttcagtaaggggagctttttgaatacagggccagggaagtcgggggagggagctccaaggctacctgcagtcactggagtcttggacaaataagccctggtgttcagaatcatccaagctggtcccagtacttggtagaacccaaaaattttccattgagtcctctttggacagttgtataatggacagttgtataagaaggtgtagggctgagagcgtgagaagctgcttgattgtctcaacaggatgatgatgagatccacagaaagacacccatggacacagtaggaagtgaccaaggacgtggaaacatgggggagggctgtgcagtgaggacagtgcagtgcactgctgggtggtcactcctggggtccctggattccccatggtggtaatacacagcacagagtgagagtccagaggaggagtccacctggcagggaagcttgctttgccattcctatggggggtaatgtcccccatgccaccccctgcccccagcccagtgctccagagacttcggcctgtccactcaccaggagcaaggaactgtacctgctaaccccagctcatagctgaggctggatgctgcaaggtcacacgcagacagacgccaacctctagcctccccacagaagtgaactgagttaaccatgagcccctccacccctgctttctatttatttccactgccaacatccccctagctatgaagtcatcaccaggccgctaccccctcccccatctccagaacaggagtggtcatagcatcctcattataatgactgaatgaaagaaacttgaagcatctggtcctgtgtctggcacttaaggaacacacatgtagctctcctttctctcatcctttggctgtttgcatgtgtgtcttggatctctgtctgtctgtgtctctcttatctcttcatggaattctgggaaacactcagaaagtggtggttggtgagggcacattcatgtccagtaatagctgatggaaatggcagagggctttgtcaagttgacggggaaggtttctgcatgccttgcttttggtggaagggtgagcgacttcgcagagcctagagcgggcttccagctgctcagtacaaatccccctgaccttcgcgccggaggcgcgggcaggtattttccacttcacagcatttcttttaattctttcctgattgatgcgtgagatgccagtgtgaaggcagctctgcccctccagcctcggcaggatagctagggatggattccaccactgctctcactccccccagcatccctttatcctggatcccggggtttctcagcaaaggtttgaggaatttgactttccttttgggagcaggagtcctggggaggtggagaaggtggtgggaagtaagggacagcctccttgcttttcatggccagagttcactagcaaaagtggggctgccttgcctcactccttgttgctcagaaagatataccagagagtcagtttaacagagaaacagtgttacgagcaatgggtaagagatgtgggtaaagaagggagtggaaatgtaatcattttgaacctaaggaacacatttgagttaaaaagtccctgagtacaaaaggggtgctgtgctcgtgtataaaccagggtgggcccattcaggtataggtgacagagagttcttctgccccgctccctgtatagttgcttatgtaaattcagggtgtttttctctcttgttgcaagaagtcaaagttggagttactcttttaagtcagcagctcaaaaatggcagagctgaagtctctatgattttcttagttttttcctctggttccaagatagctgctatagtgccatccgtcatgtctagattccaggcagcagaaagaaggaaggtaagcaagacgaaaggggtagttcctagacctagaaagcaagactttcgaacaaaccgtaaaagatttctgattgcaattctttgcgtagaactatgtcagttggccactggtagggagatttggaaatttggtgtccacctcgaatcaaatcaaacaaatgagtgaggaacagagggaagaccagatgctgggtaggtaattagcaaccctgctgtagcacttcttttggattaaatcaaagtctagccgcatatcacccctccacccacttttcctctttttttctcattcattttctatcttttttccaagtgatgcatcaggctccctactgctgaggtgcggtggtcagcctgggatgaggccctgggtctgtcttcacagactaaagatagtgccttgacctgagcacagcactcaggctccgtctcaggtggccacagtaactttgcatagatccagtcttatcatctcgtgtcatctcctatgaagccaactatggcatgctggcagagctcagcgtgcatgcggtgactcttcgttggcctctgtggaatttgcaccgcaggacattcccagccccagacttactgcgactggtctcactaacgcacaagtagcccctgccggctttgctcatgggatgttgggatgttgtcctcagccagtgagacacagatacacactcacaaaccatcttcgtgaccacagtggggggttgctggtttaaagccagagacagtggaggagaaaggaagaccaaatccttattttttttgttgctgtttactgtctttctgttcaacaagctttcaatgaccccatctaggtgttaaggctacagaggtgacagtcccagttccctacctctagttcatacttcagaagtttcaatgtttctaagatatggtgttccttacaaaggcacagcatgctgggaaagaccttcaggcatcgtctgatcaaacttcatccttttttttttttaaattgatgaagaaagcgtggcattgggaaattgagttgcttaaggccagaaaacttggaagcaatggagcccagcctcagctccgggctgtcagcccaagcccatgctgccatcccagtttgtttttcctgttacctaacagtcaaggggaatcatatttcctggtttagcaagcatcttcaatccactatttgcatgtctttcttctcatctctgggagcgaaacaaaaagagtaaaccttaaaggttttcacatccttcaccctaaatgaccacttacgcacattttaagttattgtcagcgatttgtgttttaaaatacaagccttgctatgtttagctaattctcctgggtgagagacatgattgattagaaactttaacagccgttcatggagagaagtataagtctttcaggatcacgcctctcacccagcctttgttgggaatggagaattgatctgggagccacagcacttctttcttccctggcagatgaaaaaaaaaaccctcgagatcatttgcaggccagccccgctcccatgttttttctctgaagagcatgggagaaataatgcatgttccatttcacagcttggaaaatcagcagtagttgtttcagattgctggaattttggaaggattttctctgtacttttccaagtgccccatgtgtttgaatacccaggtgatggtggcgctggctacctagacagcttcttccaccttcacgctctggactccgatggctggacttgcattcttgagggtccccaggctccagtgtggtgtgtcgggaacatagggagaaccttgctcaataagcatctgtgtctgccttggctcaagctggagcagggtgtccaaggcagcctggacccgaataaagacacgctttatttccccttcagttgacggagggggattttgaaggtagcaggggaaacagagtgagcagtgttcagggacgcagcccaccttcctgggtagttttccactgcaacagacccgccgaggccagccagccaaggatactcagagttttacaagcatgctgtgtggactggggcgggggctggcttagagccccctatgccgcccccaacctgcagtgcctcttggtgaggagaggaggcaggatgagcgtctgcaatcattgccatgacaaagtaccagaggccgagggacttaaatagcaatttattttctcacacttctggaggctgggagtctaagatcaaggtgtggtcagggttggtttcttctcaggccatgagagaaggggctgtcccaggcctgtctccttggctggtagatgcaccttcatgttcacacagcagtctccttgtgtctctgtgcaaatttccccctcttgtcatgataccagacacattagattgggaccccaccctaaggacctcattttcacttgatcacctctgtgcagacactatctccaaataagggtactgtctgaacgactgggggttagtacctcagcatgtgcattttggagagacacagttaattcatgacagcgtgtaccttacattccatggtgtttatctggagagggggaggtagccctggggaccgtaactctggcacttcctagcgccttgatgattggcttttctcctaccttctgcttccattctcctcctcccagactctctcatccaataacccccgcatctgtaccctgttcgctccataataatgataactactccttagtagttgcttcttaggtgccaagcaaagtgctaggcattttatttttattaactcatgtaatcctcatgatgacccttgaaataggctctattgccgttctcattgtataaacaagggaactgaggcacagagagatttagtaacttgcccaagggcacgctgctagtaagtggtgaagctgggatttgaacccaggcagtctggctgcagaggatactttataaaccacttctacttcacttaataggcgtaatattccacttgaagcccttcacatcttaccaagggctcccaaaacgttctctcacttgatctccatcaaaaaagagcaccattggaggggctcagaggaatgggttctaacatgtgatgtgtctggatccgtgctcaagaactgggatgatgccatggataagagcacagctctgtgttctgcatcacagactctgcattgactagctgtgtgactttgggcaagtgatgtagcctctctgtgcctcactttcctcatctgcaaagtggggtgacagtctcttagggttgtttagggaggattccttgaggggctggcacatgataattgctcaagacatatgatcgttggtgataatattacttctccgtatctctaagagcttccggggatctccaagagccatcactgccccgatcctccatccccacagtgcagagctgtgctgctcagggtggtagccctgagctccaaatggctgctgagcacttgaaatgtggcgagtgtgaattgagacatgctgtaagggttaaatacataccatattttgaagaataagtaccaaaaaatgtaaatgatctcatgaataatttttatattgattttatgttgaaatgaaaatgttttaggtatgttgggttaaataaagatatattattaacattaattatggccaggcacagtggttcatgcctgtaattccagtgctttgggaggccaaggcagaaggattgcttgaggccagaagttcgagaccagcctgggcaacatagtgagacccccccccgcccccaccatctctacaaataatttttaaaaattagctgggtatggtggcgtgcccctgtagtcctagctactagggaggctgaggtgggaggattgcttgagcccaagagtttgaggttacagtgagctatgatggcactgccgcactccagcctgggcaacagagtgagaccctgtctctaaaagaaaacgaattaatttcattcttttacttcttaaaattgtggctattggaaagcttaaaattaaatatgtagctcacattatacttctattggactgtactgggctagactagaaatgagacgctccagggaccacatctgttttgcttatcgctgtatcccagcacctagcccagatcctggctttacagtagatgctcagaaaatacttgttgatgctgttttgattgtacagatgctctgttcttagccccagaaaggtctcctgggtaccacgccaggaccagaggaaagtctttcgttcccaaagctcagggaaagggctacaggctgggtttttagctcactgggtctctgcggcattgccattgcccacgggcttggcgcaggtgggcccccagctgaatggctgggtttgatggcagagccaccgtcttgctcttcagcccaagggaaaacatggctatggtagtttcttctattttcagcacattagagaaaccaactttgtatggaggacatgaaagctcatttcataggccagaggaggcccgtgaaagagaacactgtgtgcaaacagcaggagagaaagacccgaaggaaatttccatcccggctgaggtcctctcctggacttggctgctcacaggagccttgtgaagatagaagtgtactccttctatcccaggccctttttcacacccccttcttctcagaagaaaatccgaaacccagctcttgtaaaggggtgcgtatctgccattcctctttgaccttacatttatgaaaactgagtctagctccacctgcaatcttgatcaatcccaagatttgaggccactgggtggagcaatacagggaaggagttatagttaaaggatgctggagttcaaaggggtcttagtctaaactacttacatttggggtttctgtggttctcatccttctgtgacatctctgctgctattgagggctcagcatgcaagagaaatgagcctagatgaccacatcctcagctcgatccactctgtccacttccagactgccatgagcctgggaagggtgatgtagctgaatctatgagaagagcgattcacctgtgcccaaatcctgacatagcttcgcctgagttctgtgtctctgagcaagtgacaacttctccgagactcagtttcctcatccataaaaacggaaggagtagctcttgcctcatttgtcagtggggttaaatgagacaatatgtaaaaagcagcaaacaggccaggcacagtggctcacacctgtaatcctagcactttggaagggcgaggcgggtagatcgctggagattactagtgtttccacctccttaagcccaggagttcaagaccagcctgggcaatatggtaataccccatctctactactactactactactaataataataatacaaaaaattagctggatgtggtggtatgcacctgtagtcccagcagcttgggaggccgaggtgagaagatcacttagcttgggaggttgaggtgggctttgagtgagctatgatggcgctgctgaactccagcctgggcaacagagtgcagtggcaccatcgctgcacattttaaaaagcagcaaacagcgcttagcatgtggtagacatttaggaagcaagagagccccttctctcctgggtcctgagtgctagtttttctgtctcactctcctctgcctcctgatacacagcagtagtggtgaaggtgctcctgtctttgaccaggacccgggatgcctggtttcctagcagccacatgattttcaccccagtttaaccatacccagtgatggggtctcttccacaacaaaatttggataaagtattctggaagttggagatgactagtgtttccacctccttgcttttcagaaaacacctgttctttctatttgtgtcaggattagaacatggaatcttggcaaaaagaagatgttacttttaattaaacatcctgagcctcgtttctcagtctgagatgaatcagtgagctccatctgggtggaggtgaaggagagcaggaaatcatttttaatagaaatataaactctgatggccacaagattaaagtcaaggatacgtgttggtaacaaggcacctggcacatagtaggatctcagtgtatgttactttcttatccttgatgtcacacctgaagcaggtcagcaagcaaaggaaacgggctgggagtccaagatctgggtttgagtgtcagcacgtcctctcattagctgtgtgccctcaggaaaaccacttaacatctctgagccccacgtttctcatcttaaaggctggaaataattgcaacttttacctacctcgtggggtggttgtgaggcttgaatcatcaaatgaaagggctttgtaaatggcagaactccatagaatggtagttcctcctccttatcattgcggttagtgataattgtgtatctttttcatttgacttgggtaaatattagccaattcccagtcatgactcaaactagatatttttcaaatgataacgatttttaggccatttcctaactcttgcaatgaaatatggatcgtgtttgctttctggagtcagaaattcagattttttccatcctttattcctttttacaactgatgtgtaattcccagctcaccaaggtaccagatgggagatcaggaggtcttttgagaagaaagaaaaagctcattgaaaactgctgatatggaatgtttatttaatttcagaggaggagggtctgtttttgttttttaggtgtaatacaagtagggtttattgctgtttgagcttttaattgatttactaatattttttatagcttcttattttaatgtttacaggtccccagatgctgagatttactgacctccgtgaaggaattgataaatgatttagttgaaatagcaaaactggaggcattgtgtgaattagaaattgtgccacggagcccactcaggtgccactaatttatttaatgtgatttggtttgtacagctgttcctcaccacagacaaaggaaaaacaaacaccaactgttcccctagaaaaatggggagtgccccgagggattgggccaaagactagggagcacccgggaggatccagcaggctggcctgtgttgggtcagtgcaacaaggcttccttccagaggcctgggcgagccctgtctaacctactccatcctcacctccgtgcgacttccatctcgtgacgttctactgaatctgtgatttcgctaaggttgatttcagtgggtttgttttgtgaatactttttcttctctggcatcatcagagatttcttgcaatttttaaacttttttttgtaggtatgagacaaatacttgtttagtatagaaagtatagaaaataaatgcaagtcaaatgaataaggtaaaaatcaccagcaaatccaccacccagagataatcattgctaacaattttgataaatatctttccagactttttctctgatattcatgtttgtattttttaaaaaatgaatactcctagcttatattgtttggtaacctgtttttattcatgtgtcatttttgagcagtttttctccataacattcaactgctttgcttagactggtgttcaaagggggctcatacagaccaaccctaatttaaaaaaatcttactaggaatggtttgcccaagtgcattgtgccgttgtagagagctgtgcatttctgtttgggtcgctttaatgtcatttcaagggcactgacataataagaatgcccttccccctttctttagcccatttaaggtactttattaacaagttcccaagggtgactttgttattcttgttccctttcttccacccatccatctgttcatccatccatccatccatccatgtatggagcaattaggctgtgccaggcattgtgtctgctgataaaaacacagatacataatttcagcagcccctgtccactagggtaccagtctccatccagaacttccatctgccctggacatgagatagggacctccatcttatttcttcactatggagttgattacttccagcgagctatctagcagataattcctccctttacagtggaggcatctcaagggtaggaactgtatatcacctctcttctataaaccgcgaaatgctgactgtgcctgtagcctaatactcagggagaccacgaggtgaactgaattttagagctgagggtgaagcggcgggaacatttttaaaaagctgtttctcaacacaactcttatgtatgtcatcgatcaaagaaaaatgaggatgctaacaaaaatgttctttgattacttaagactttatttttctaagtgtggtcttcttaggtctttgagagacagcaaggcctttttgttaaggtttagacacattttctcttggtgtgttctagagaagcacggctttatgtaaaaatgtaagatttatttttgccagtaaaatataacacacagcccagcccagcaacagcatacatcctcactggatgccagcaacagtcactgtgaaatgttacaagtgcaaacagccccagtccctcctcagacagagcatgctgcccatgccggcaacagtcactgtaaaatgttacaagtgcagacagccccagtcccctcctcggacagagcatgctgccctttttccagggaagtggggttatttctttttatggtgccattttgacttcctaagactaccatagatttataaggaaataattcctccaatgggcctaagtgacatcctaaagttttacacgagccggttatgaaattgcaagaactgtttcatggaaacatttccatgtcaccaatgtaggcccatttattaaatttatggaacttgctgtatgtgcttttttaaagataccaaaatatatttaataacctcaacccggaggcaaacctcgagggttaattacagtaatgaatgtggccaacacccgggctattcaggaagagagagtggctctgtgctctgcctgagtgcctcaccttgtgctagcagactcagggggtaactccataaactttcatcatccaacctcttcccactttcacctctctaggtaatctggtcactcttggatgaatagcagatgtatgagaataaccttgagatttgggatcgaaaggcctgactctgagatctgattctaccccatttattatgtactgtgtggccttggttatgtcactgtcctactctgggcttatttttacatctataaaaggccagcatactaatagcactcatctcaggatttgaggggaaacagaactttgggaggagcaaggagcagcatggaagaaaagaagagagtctagtcttaaaaacgtttacaaatgtatcatagtccagaaagtcttgtttcaaactgtgccatctgcatggaggtagttgaatgtaacagtgacaagtgcaaatcctggggtcacgctgcctaggtgtgaatcacagctgaatctctttttcctcatctgtaaacttgggatcataatgactactcacagggcggttctgagtattaacttagttcatcaacctaaagtgctttgcacagcatcgggtacatcatgttcaataaatgtaagtagttgtatttctaatttttaactttttatgcctattgaaaacttgaacactctgcatttaaatttgaaacaacatacttggaattttctctggatgccaagcaaatgtccatgatttgtggggtggggggtgggggtctttcttttttctttccctttctctttctctctctctgtctcttttttttttttttttttttttttttgagacggaatcttgctctgtcaccaggctggaccgcagtggcgcgatctcggctcactgcaacctctgccttccaggttgaagtgattctcctgcctcagcctcccgagtagctgggattacaggtgcccgtcaccatgcccagctaatgttttgtattttaatagagatggggtttcaccatgttggccaggatggtcttgatctcccgacctcatgattcgcccgcctcggcctcccaaagtgctgggattacaggtgtgagccaccgcacccggcctctttctcttttaatcttatttagactatcatgtatagaattaagattgaatactttatttaaattgctactaattgcaagttctgtttggtaggggtttagaatatgcttagcatttgaaatgatcacgggtataggttttctgtccctgaaaaacacctgaactgtttccctcaagctttccaaaacaattcaactttggatgcaagcgagaatggagaaatttaataaagatttttatttgttttccaaaatgcaatacagaagattggggttattgtgaaacgtgggcaggcttttgtagtcccctttaccttgaattctgctttgccaaagcaagattttattaagataggactatccaatttccttccgttgttcttgggactctgtgtttttgcaactcgtttgcctctgtctgcgtgttgaattctagagggtgcgatgatggaagaataaaatgggatggaataataccagtgtcctgctgcattggtattcaaattcagtatccaaggctccacatgcctgaaatacagatttactctgaaatacagtggatggccaacaaatgtttcctgattgaaaaaagatggaaggaaagggaagggagagaaggagaagctagggaagtcctgtgtggaacagtagagctgggatcaggtacctcatcagagaggcggggcaaggtctgataaccccttttttcaccgttctacagtaccgtgtgcggtggggtctggagtgagccagaacagataagtcgttgccccttgccatcccccaaaactatgcccagggtagctggccaggactctgtctgcatcacactcctgccagtgtatggcatggggcctggcaaataggaggtacctttaaaacgcttgttgagcagaacattccagttgacctgatagttcttcatgaacatagtcattcattttcattgacagaacttatgttaaatgatacgaagttattttgagaggtaagtgaccctgaccctgtccacaagaattattcagttccgtgaatttggtccagcagagtctggtttttaacagtcatttggcctgagctattgactgcaaacttttaagattcttccaggccgtctcattagaagttgacagcactttggcaccacggagacctacaggtgtccttattcccccaccacgcttctggtaatgagaaatgaaagtcgtccagcctcactcagctcactgtgtgttccagattacacaccaaggttgtgcaatctagccttggttttgctagatactgatccggctccagataaatgtcattggatgacaacatatatgttccttaaaactccagcttttggagtttcatcccagtccttaccttgcatctcaatcagggacagaattttggccgtcatttgggaaggagccaagtggacacaggatggttttagacgagtggtcctaactttttcatctgcatttccatccagtgttggagctaggacttccgcatgcatccagactctgctttctgctcatttcatgaccttaggggagctatgaattcctctgggcctcagtttcctcatcggtaaagcaagcaagtcatggacctacctcaggctggttgtgaggatggaatgagatgctgcctgtcagcttcttagcaccacctaaggtctctggtgatgctggttattgcagctgcacatccaaagcacctggcgagctttcaaacaccttagacacccagacccacggaatcagaatctctaggggtatgcacccatgagttcatggtttttaaaatcctcagagatgatttgtgtgcctagtcaggattgaaaccactaattctaaaggaactggattcatggggttttgtctttaggagggagtctagccagtagagccaacccacagaagctggagtaagaatacttgggttccaatcccggtaccacccctggcttacccccacaccatataccctggctgtgtgaccttgagctaacgacttaacttccctggaagtcagtttacacaataagaaagtgaggacagtatttatgagcacccctcatagggtcatatagggactaaatgagattatccatgccaagtcttatattaaaaagtgcctgccacaaaggaagcccccaggaagcggtgagcacatgatacatgttaactcactctccagaacaaccctgggtagtagattatgtcattatccagtttccgtatgtggagcatctctgtaactcctctaaggtcacgggtgttaaacccactcccgagacaccatgacaacacagaacacactgcgttgggacgtcagctgggtcagctgaaggacttgtgagtgcagctccctgagctgcagctgaccacacaagtgggcaactgaatacagtccccataaagcatgtttatcttatctggggctggagattagctgtgttgtgcagaagggaagaggcattccaggtctttccagctgtcttgcctgtgaacatttatcgtcccctagttccgacgtttattatccccccgggtggatagcactaattcataccagtctgtccgatggcagcaacccccatagatgtatgggtcatggcggaagagggagaaaccccagactcttgctatttggagggaatgagattctgatagtcacagccctcagcaaactgttctctttggaaccaatacagttgttttcctgtaagaacacagagaagacccaggcaactctgggttccagaaatgaaggcctccttgagaagccacattaaccctgacatttctttctccccatttctgtgggcaaggaacacggcccccaggcaactctgggttccagaaatgaaggcctccttgagaagccacattagccctgacatttctttctccccatttctgtgggcaaggaacacggcccccaggcactgaggaagtccccactgcagcgtgcgttagacgtacgcacccctctgcaagcacaggctcgcacaatcgcccgctgtgtctcctgccagccagctgggtgaatgttcccgggcagccagagcgtttttcctcccctcctcacactcccctccccttctcctgccccgccagctccacgccctcctgaatgttccattctaaacagccacaatcaggagcctgttctgcactgggaaaaagagcagcatgaaggcttttaaacttgctgggtaatttaaggtatttatcgctatttggagagctttgcttgttttgaatccattccccctgcagctctcagaaatggtgcaaatgattttttttcccccttgaaaagggatgcttctaggtctttccactgtccccgaggccggattctgaatgcaggcctccagacctgggtgcattcgctgaggttttgttcattcataaacgttaattgggcatctccctgctccaggcctacattgtgtttgtagagtgctccccctttctgcagtggactgtgtttctaactcatgcgcagtaaacgaggtcagagagcctggctttgggatccaggctgacccaaggtcaagctgcgccctgcaaattagctgtgtgaccctggacaccgttctcagcttctccagaacacagtttttcatctgttaaatgggtatgatgacagctcgtagcttacttgctttggaggccagcctgcccgtgtccagatcccagctctgccacttcctcctcctgtgagcctggcttttccgttttgtcagttgattcaccttcagtcaggaataatagccaatccctcaaaaggtggcaagagaactgagttgatgcatatcaaatacttgtgcttagcacatagaaattgctcaactcaacaaatgttagtttagaggaggcccttaataaatctaagttcccttttcccctctcgctttcctaaagcttcacctaagccaacagctggacagaggcggaagcttgccaagagagtcagaagaatctggactccacaccgcctgctgcagggcctgctggcctcacagggagagggaggaaggggggtccaccctggccaggtgcactctggtgagagcagcccacagaggccttgtggtctcccaacttcctcagtccttaggatgctaacagggctgtagcagagcgagtcctcaaaaccaaggggcttccccaccactctgaatccaccagcaatctctgcctctgcacggcacccagggcagggtggtccttccccgcttttctattccagaccgtccatgaactgcctccatttcctccacccacccccaacatagcctccttcatggagcatatacacatgtgcaagtgcatatgttcagacccacacacacacacactcacactcatacacactcacacaaacacatccatacacacatgcactcacacttacacacacactcccacacatacacacccacacatgcactcacactcatacacacactcccacacaaacacatccatacacacgcactcacactcatgcacactctcccacacatacccacacacacacaaatatactctcacacatacccctgcatacacacacatcatacatacacaccacatatacacacacactcccacacatacccctcacatacacaaaccaatacacacccacacatacactctcacacacaccccacataaacacacacccacacatacattctcacacacactcccacacataccccccacacctatacatatacaccaacagaaacacacacatacatacatgcacatacatgcacactcacacacacactcttttccagctttgtgtttctgcttctgccttttcagtttctttgatttcccacatatggatttcctgccctgccttctgagggtgttgggcaggtgagaagccctaagatcatgttcagagctgaaaacataatcaccagattggaatactggagatgagatggtagagaatggctagttttagcttttctcattaacacggggtgggagcagatgaccttttccttttagctgacagctagtctgctggccatgggcacaccctcctccgcaaagcctcttgtgatctccagtctgactggacacggcttcttgctgcgcccgtgatcctaagcatggggtgtgggtggtagggaaaagcctggagcagggctgcttggttgaaatcttggctctgcaagttatttggttttgctgtgccttcatttccccatttgcagagtggggtcagtatttgccctgattcttagggttgttaagaatattcgatgaggagagccacatcaagtgcttggaatgcctgtctactgatcattactgttaccagcgcgatcatggttttgatcatggaagctcttagcccactgcactgtgatcggtctaggaagtcctgtcgcttcccccacaggtttcgcagcaaacgggccaggacagttatctcaggcagcctagagaacgcctacagtgtgagcaaagccactgtttaaagtgaggtgatactttattcaccaaagattcctttacttacagaaagtcccccttgaacttatgatttgaattttagacattttacccaatctctatctttctctctctttttctctctctctctgtctctctctcctccccgcccccagccctcttcttgcataatgtgagaagaggctttcaacagccaaatggaaaccccctttgtcaccttgtaggcgtgtggcattgggacactgaagttagcaaatcggccagtgactcatcagtttcctctccataactggggtgtggttgggggatggggcaaaactggcacttggcaggaggccttggcacagttcccaggcagcattccttctgacccgtcagtgaccatgtcctacccattaaggaatattgtaatgatcagccctggaggaaggagcattaagatttctgctctgacttcagatgttttgatacaatttgggtagctcgagttctccatccctgacaatgaaaatgcccaggaatgtcagggaagcgcgttttctggaaacctacctccctgagacctgtctggcctgcacaggggggtggaccgtgtgggagagaggggattgtccctctctccccaaggtcagctctggcttgcggagtaatggctcgtgtgagtgatgtgtgtgcaggactccattaggggcccggctgtccagctgtcttgtggcaagtgtctttgcagagaggggcgaaaggagcagatagctccagaaatggagaataaagagaccattgctttctgctttctggcaaattctgccaaaatactgcagagaatgaaaaactttgaaggaaaacccctttatcagctatcccatgccttgtggccattgattccacgagcaggtgtttctgagagctggaagctggcctggccctggcctctttcaggaatagaacatgtgaggatggttggcttcaccacctccaaagggacctcgggaggagtaacctcccaatggggcaagattactcaccatgacgggcagctcagtgcatggcaacaagcgtatgctctgctgggcagccttcttggctggaaaactggctcgtgattctgactgtgactctccctcctacactttccaagccaagagcctcccccagatttcacatgcctcccgcatggcacctctgttctcctgctgccaccactcagacacccaggcgtgaggattactctgaaaccctgatgcttggccatacctgccccaccatttctgaggctgccataatgaatcaccacagaccaggtggcttaaaacaacagaaatgtattctttcccagttctggaggccagaagtccaaaatcaaggtgtcagcaaagctgtactccctctggagactctaagggaagatttattatttgcctctcccagttgccaaactccttggcttggggccccatctctctgctccatgtacacgttgctgccccctcttctgtcttcttttttgtctcttataaagacacgtcattaatatttagggcctacccacacactccaggataatctcaagatccttagcttaatcacatctgcaaagaccgtttatccagagaaggtcacattcccagattctgggaatttggatgtggacctatcttttggggaggtaccattcagcctactgtacctgttaatggaatggtttgttacatggattaacactgacttgaggctttctagggtgagcctagagcattttctcaaaaatacacatgtggtgacacctatttttagctatttgacttggacaagtaacttaccctctttgggcctcagtttcttcacctgtaaaatgggaatgataatagtacctacccataggtttgttatgagcattaaatgagttcatgtaagtacagtgcttcgagtgctatctggcaattagcaaagcactccataaatatcaaccattcttatggtgattatcatcatggcatcataatcatcattggaagctaccccaggcaatgagactgtcctagacaactcatttaacatgtagcacagcacattcacaaaccgtttgtttcgacttttcgacctacttaaaatcacttggaatttgttgccgtgtgaccttgggcaagttccttaacctctctgagtctggcagaacattccctggaagggctgctgaaagattaaatgtggtcagcctcgtgacacatgttctgcatcaatccacgttggctgagcagtgagaaggcagcatgttacagtcttgcctctccacagacgttggtggcatctttcttccctgcccgtgtctttatggctgctcggttttcctctgctgtcagctctcccggcctctgttgaatggcctgcacttagttttagtcgatttcctcccctgagtctgatttctctgcagtttccagcacagataaggctgtacatttcagactgcggtcccagagcaggatttttttgctggcttctttggggaggatgtttgttaatacagaatcaaaccttagctgttctgctagtaaaagatttccaggtagattctaactttgtgtgtttaaaactcttagctgttcattaaaatgctgccttgtttctctcagtggtctgtcagagtgatccgaaccagatcactaattctacgacaaccagtgtttctataatgataaccaccctgccatagcacttactctgtgccaggcattgttgtaaggactttatacttaatccttgcatcctaacgaggaaggtgctgttacaatccacattttagagatgaacaaacaaacaaggcccaagaaacaaaaagtgttcagtaacttcttgtccagtatcacccagtttataagtggtgaagctgggattcaaacccaggccctcttgagtccagcagctctgctctgagccaccacccaggactgtccctcattaaatgcctgaataatttcgaagagtcagagttccataaatgtttatagaattaattgaatattgaatggcttttcctgttaacggaggaatctcagtcagtctttgctaacggattagacttttttttttcagcccctgccttgagacaagtgtagatttttctctcactggttttgcagttctatatctaggatataatgcccttgtcttcttgcctgtgtatggtataaaaaggatggtctttcaaacccagatactgtgtaacctgggcaagtcacgtaacctctctgagcctcacttttcaggggttaataacatttaacgcattaaatgtgctaatgtatgtaaagtgtcgggcataataacaggtcctgatacatagtgacttgaaaaataaaatacaaaatactttgcatttttccgaagaaaggtactgcgtaactcttaaggtatatttttactatatttaccttgctgtggtcagtctagtataggtgtctctgttatattaatgttttagtggtgatcactctaagcagttacatatattaaaatattctggccaaatgaaaagtttataaagaaatgcttttaaaattgaaccagaagtagatgacgatagtcgtcattattttaaaaagagaggtttaccgttgaaatagatctcattaaggacctataattgacagaaattacttcagcttctgttatgctcacgtcttgatggcagcatcgaatacactcatgtgccctctctacaagtaagaatggtatggaattgcttcaaccgtagatttgcctttttccccctgggtgatacagactcataactttccaatattcatttttcttattttctcttagctatgtaatgtgagtagggtgtattactatctcctgttcacaggatccaattaactgaggccataagaaataaatgaatgaatgaatgaaccgaactaacaaccgctgttatgagccgagtgcttactcagtgccaagtgctttgtttggactttattcaatccaggggttgaagaaccactcactctggagtcagattcctggtcctaaaccacgtacttaagcaaattacttccctgtgcctcagtttcctctcctgtggaatgggattaataacattgccattcttacagggttgttttgaggcttagatgatacatacatgcaaaaagtccacagcatgctgtcaggctgtaagcactcagttccattaattgctgttgattccttcaaggactctgacagaggtacacccctgttttgtggatgaggaatttgtgctcggagaaggtgggggcttactcagggtcacgtgtgctgtggtcaggaggtgtaggctaaaatccaggtctgactccagagccaaggttcacaagctacatccccgcatgcctcgactggtcaactcctataattctgtctgcataggaaagacctgttcaatgatcatctttttatattgttttgatttttgagtcatgtatctcatttgagcaagagatcagcctgcagttagggcaccgtattggtttccaattgctgctgtaacaaaatgctacaaagtagaggctgaaacaatataaatgtgttattttactgttctggaggtcaggagtctgaaatgggtctcctggggcaagaatcaaggtgtccgcagaaatgagttccttccagaggttccagtggagaatctgtcccttgccttttttagctattagatgccttctgaattttttggctcatggccgcatctcctcaactctgcttccattgtcacatcttttctgactccgagtcactgcctccttttcttttgagacagagtctcgctctgtcaccaggctggagtgcagtggcgcaatctcggctcactgcaacctccgcctcccgggttcaagggattattctgccccagcctcccaagtagccgggactgcagacatgtgccaccacgcctggctaatttttgtatttttagtagagatggggtttccccatgttggccaggatggtctcgatctcctgaccttgtgatcggcctcccaaagtgttgggattacaggcatgagccactgcacccggcctccctgcctcctttcctaaggaagctgcagctcacttgggaaatccaggataaccttcccacctcaagacccttcactctaccgcagctgcaaattctccttttgccatggaaggtcacattcacaggttccagggattaggatgcggccttttgggcgtgtcattctgcctagcacagatggccattctcatcgtgccagggtgctggcacattcttgtttctataggggctgtgtggtgtgggccccatcccagcccctgcccttactagcctgtgagcctaggctaagcagacatttcatttcttcgcccttctccaaccttctcccgaccctgccccatttcctcctttcctcatctgaagaatagagttttcagtaccagttttgcgtgactgttgagagcacaaaatgaagtaatgtgtggaaagtgcctggtcctaattggctctcaaaaatgggagccattattctcgcaatgattacttttcaattatttttaatgttcctgtaataacaaacagagcccagtgtcttggcctggtcagagggaacaaaagtcttagcatgcaggtcgaggggtccccatggcctccaaaaagcagaaaaacaacaaaacctggttctaactagctagaactggactcagttaggaacaaaagggttattcagctgaccagaggatgggcgaggaacagaaggggaaggtgagtggagattagcttgtcaaacagtattttcttgtgaatgctgcagatcaaggcagtcttttgtgacagcatttatattaaaagaggcccaagatatttatagcccctattggagcctagagcctaaatagcaactctgtttgatcagcctttcacaggtcatgtgatgtttctccttcagggtgtccatttgaaagtgggagaaaccactaggaatttggggggaatagagcagagagagagaggtagggaaatttggtccatttgcagattcacggaagttcaaatgtggcgcatagctgcgcacagcttcccctcctccttgggtaccatgttgccaagacgggcggttagagattcaatggcagagggctagatgattctgtttccaaggggccctgcttgccttccagccccacctcatatcaccctgtccctcagttgctgttccagcctcttggcccacattcctcaaacatgtcaaacaggttccaccaaaggacttgcatatttgctgttcccactcctggaacatacttccctgagatctttctgtggttggtgccttctcatcaagtctcagatgaaatatcacctcctttgagaggccttctccaaccttccaggcactgcttcttgcattgccttgttttattgtcttcatagcacttgtcaccatcagaagtgatcttgctcattaatttgtctggtgtctctctcatcacctctagaatttaaccttacatttaacttttattgctggatatctctattggcctatcttagggcccaatggagaaagaaaaatgttctaataacatattgtaaaggtttgcctagaaaggtatatccttccccaacatttccattcactgaaagaaaacaccttatttgtctggtgtctctctcaccacctctggaatggaacttctaggggaacagggacattggctcttattgactgccataaccccagagtgagacattgcctaacaaatgaagggcatttatgaaaatacttgctaacatgctgcgcttattatgggccacatcctgttctaaatgttttgcatgatttaattcatttagtcttctcaactaatccattttacagatgaggaaatggaggcatagtttaataaatgaaaaacatcaaatgaattagactattcaggtatactggaggtattactgaattgattcagcaattgtatcagttatccgttgctacagtaattctgcataacaaaacaccctatttcttcatgcttgttaaggctgccaaggaatgaaaggacaaggtttttatttttcttcacggtgggggagataaaaaccacattttatattttcagagagtgacaatgagcattaattgagcatctactgtgcgtcaggctctcggttacgtttggaattaaatactcaaaacagtcctcaggagtgtggcattgaccccatttcattcagtttgtgaaacagactgagaggtaaagtcacgtactctagctcacacagtcttagggttattttaatttctcccgctctagctcacacagtctcgccgctatttttatctctcctgagattctccagacaaaaccagctcgtaagagggcacccatgatgtcgttggtactcagtagacattagctgaatgaaggaggaggaaaggccaccaaccgacctgtgagggtggatgttcctatcttcgtagtactcagatgaggaaactggaatttagagagattcagtccaaggtcacctggctagtaaatgatcaagtcaagattccaacccagaaagttccatttccagaagccagtgctatctgagggaagtagaatttagcagtgaggacttcaggaccccaaatgccttctccacagtttacagcccccaccggccaggagagaggcgaagggagaccgagggcatatacgtttgtctgtaaacccgttgggagggtacccaccgaggcctggaaccaattcaggccccggagcctccgcgtcctgctccatatccccctgagccgcagtctcccttgagcagaactctggagtcagatcttcttctttgacctccgccccgtgtgtggtttgagaaggaagagttgggaatggagagagccctcatgcgaagtcatttgctgatgagaccccagcagctggtgaggggggccaggcctgtgtggattttgagtgggatttgtggcctgaacatactggggccgccgagccccagctgcagggacagccagcactatcacctgccctgcagagagcaggcatctttctttcccttttggaaactgccatgtgtaattcatggtagagcacagagaaagacgcaatggagccccgccccatggaaaatcctaattagctccccacagggctgccagaatcatggcaggctcctcacagcatctctgactcttgtcaaagggtggcggccctgactgtccagaggaagaggcctccccacaacaaaacccctctggtttgtttttgttgttggtttgtttttttactgccccaggaatcagggttatctgctggaccaccttataatttgcaaagccccaccaactggtctgctttctttagagtgacttgaacctctgagcattcatcgactcaccaagcatcaactggactcctgctgtgtgcaggggttttgggctaggccccagggatacagcagtgcataaggctgtgtaatccttgttctcaaggggcatactttctggttgagaggacgcaggtgatagcaaatagatatataagaagatacaaggtagtaatagcatgagtgagccagtgggtgttgctcttaagccacgctcttgcctctcaacactggagtgacatgcaaatgccatggggacatctcagggacatactgaggcagagagaagagcaagtgcaagggcaccacagcagatgcaagcctggtggctggaagaagcaaacacaaaggctgtgcaaggaaaccctgatgaatgtggggatggggacggacatgtggccaggcaggcacacaggggccaatctgcggggcctggtcagaccacagaagtaaggatgttctgctaggaagcaccattgcttttgcctactgggcagaagtgcagaagtgtggagcctcccactggtgtcctgtcattcgagggtttatttctgcttattgggtcagtgattcagctcctgcacctgctccatgtgggaaggaaatgctgtgcactcagtaaagtcagttcctctcaatccctcctcctctggtatgtgcccacccaaaccacgtttgaaatcatcaggtcaccctgacttttaacttataccacactcccccgggttctcacgtgcaagcaaagcttgactagctgggcccacatctttgagtgccccgcccccctgttcctgctgtgagtgaagggttcaggtgaagaaggcatagatgttaggggcagacagatcttaggtttgaatctcagtcttgccacttaatggctgtgtggtcttggacaagtctcttaaagtctctggacctcaataacactggggataataatatctacttcaaagggttgttgtgaggatgaattgagataataaatgaagacatctagtgcaaggcaagtgcttgatcagtttaaaggttctctcttcttgcagtctcttaccagcctgttgtggagtacctggaaggaaaggtacaacacttctctagtaacacatcactgggtggcagtgagtacagctgggctgtctaatgactttgtaatgagtaacttcatgcattaccatctaaatgataggatacatagaaatagatcatcaataaaaaggaatgcagtactgatacatgctacatggatgaacctcaaaaacattatgctaagtgaaagaaattactcacaaaagaccgcatatgatatgattctattaatgtgaaagttccagaatggataaatctatagagacagaaactagattagtggttgcatagggcttagaaagggcatagacagaatcttttgggggtgataaatatattctaaaattaggttacagcgatgattgcacaactctgtaaatacatgaaaaaccactaaatcgtgcattttaaatggatgaattttatggtacataaattatatctcaagctgctttttaaaaaagagatatagtttcattactttcagaaataatacaaagtttaaaatgacatgctaagcctgggcaacatggcaaaaccccttctctacagaaaaaaataaaattagccaggtgtggtagcatgcacccgtagtcccagttgctacttgggagacaattgaagtctgtttttcagtctgataggtctagaaacactcatatacctcttttttctttttgtctgttttgctttttttttttttttttttttttgagatggagtctcgctctgtcgcccaggctggagtgcagtggtgcgatctcggctccctgcgagctctgcctcccaggttcacgccattctcctgcctcagcctcccgagtagatgggactacaggcacccgccaccacacccggctaatttttttttgtatctttagtagagacggggtttcaccgttttagccaagatggtctcgatctcctgacctcgtgttccacctgcctcggcctcccaaagtgctgggattacaggcgtgagccaccgcgcctggcctgttttggttttttaaaaaagacactggcataatattttgacaaatgccgaaataatataatgtgggattgggctctactggaagtatatatgttgtacagcactgggaacagcaaattccatcagggagggacaaagtgagggaacaagagtatcaggaaagttttctaaaggaggttgcatctgagcatgccgttgaggaataaaagtgttcatctgtctggccaaccgccacaaactgagtagaggcagcagcacacaaaagaaaagatcagtaatattctataagctttgacctgcctgaagaaacagcagcagcatttgttatggttgtattttagttgtgtccttggtgacaagcaaaccctccctggccatcggacacaagtggatcattgatatcagttgactcctggttaccccagttttggtaacacctgtaatgtcttggcctggatcttggtagtgaaagatttcatctctctggtgtttatggtcttgtttttcaccaaactgacattgggagaatctgagacagactagagatagcaatggtatcctccatatggcattaggatttcacctgtatgatgtgtttctcctgtgaagccacctcattgggaaataaattctgccccatggcaaccgatgttcaatcccagtgacagcagcatagcccggcagaaagcactgagaatcaggttccagatttcaacactgctcctggccttaatgagccagctaccgtaaccgtagccaccgatcaccaagtaccaaccctgtgtccagccccacctgactctctgtccttcttctccagacttgtctaataggggtaaactgtacttatcttcacgggagtgttatgcattcaaagacaaaagtgaagccactttaaaagatgtacaaacctcaaaagggaaactaacctttgcaggaaggaagaaagtgttgaaatggcaaaagggggcggggtcttgagcaggaggtggaatggagtatgattgggcagggggagaatgtcaccaatgagcagggtttgacactttcaggcccagtatccacctgctcagtgcgagacaacccagcagtcagacaaaactaaggcagaggcttcagcaaagctggacacatgctagctccccaccccaaaacagagagagagggaaagagaaatcatttatatttataaaaatcatcaatgtagtcatcataggaccagtaagaaatgaggccgggcttatacttactttatggtttcaccttattttcacttcgaatcacattttggaggtggccctatggttttgttagggtttcagacctctaaaggtctaaatccagctgtggctacactgaacaattttcctgtagtggttgggagcaactttgtggggttgaaatatggtattcagaaatatggatagattttcccaggaaatagtaagatatgagattcccctttcagccaccccagaactgatcactctcatggggcagatctttgatttgccgacaccagattacccacctgcaaaggaaaatttttaaaaatcatgctttgaacatttttctttgacatttgaattgtatcaattgttacatcccttgggcgcattgccgggcagtgagtagatgccaagaacatctaccaggatgaatgaaggaatctgtcggtgaataaatgaatgtgggagtgaatgcatgcattcacatctatgggaaaattcactatgattagattcacctctgaactcagttccatcatgctagcatctgttagccaagtaacctaagctagagaggcctggagtcctaccaattcagtggattagaagggcagagaggtgaaagaatgttcccttaatgcttagcacttgactgtaagtgcacactgctggcagaatagtcagcagtggaaatgagggaggagcgaggagatgcggcagaactagcagcggggcagagctccagatccccaagatggtggcattatttatgagaaaggactcctcttgcaaaactgtgcgtagacgcatgggtgtggctcttcccccaaaggactggctttcctttccttccttcttgaaggattacagaataaataggaattggtacaaaatgtggatggatggatggatggatggatggatggatggatggatggatggatagatgggtgagtgagtggatggatagatggacagataggtggatggatgagaggacatctacacagggtggtgaaaagagcattggccttgaatggcagagctactcagcttctttgagcccaactctatcatctgtaaaaaggggatggtacaccctgcccctccatggctccaaaggctattagaaagctcaaactgaaagccaagacacctttgttttgtttgatatggtttggtttggtttggtttggttttgttagagacggagtctcactctgttacccaggctggagtgcagtagcgcgatctcagctgactgcaacctctgcctcccaggttcaagtgattctcctgcctcagcttcacaagtagctgggattacaggcatgcactaccatgcctggctaattttttgtatttttagtagagacagggtttcaccatgttgaccagtctagtctcgaactcctgacctcaagtggtctgcccgcctcggcctcccaaagtgctgggattacaggcatgagccaccaccacacccagccccaaaacacctttgttcagtcaaggtgctctgcagctataaggaattattttctatgcaacctcttccctccaaagactgcctctaatcccccatgctgcaaatatattatgattaaagtgcaagagtaagtcaaaatcttagtaaactctatgatcactttggcattcctccaacaaactctgcatggattttgttcctcctctcagctcccaagcaatttttcttacattggaggttgccaagattttatggctatttggttatcttatccatccagatggttagcattaatttatgctgaagtaaatctgcaaaacctcatctgtctcattgctccagaagcattaggtgtaaggcctaaaaaaatcttaatatatagcctcctgagagggctgaggtgcgatgttactgcatgctttttattcaatttggcttgaaattctgctcttctatcccttgatatttatatataagcaaattaggttgtttggtataagaaacctaaacttattttatgacttttaatgcagatgctcatctcaagttacacaggtgctttttattgagaaaagttataccatgatttataccaatgataaattttgaacaccttttctccatttttgaatattcatcattaagacataatgtatgggttggcgaccagggattcaaatactcattaaatgtgtgacctcaggcaagtctctcagcctagttgagctccatttccatcacctagatgaacacttgcctgtaggactactgtgaggattatatgtttaatgtatgtggggtgcttggcacataatagcacttaataaatgctattagggactattcttgttatggttgagccggtgaagaattttgtgtgagagattgtgtctggactttcatttggagcaagttaggtcaaaataacagctcctggcactgctggtgctgaacatgtgttctctgcctattcccttgctgagacatgaattattaatattttatgccatttattcctgtgctatttggggacttctctggcagactctggtgttttctgatggttccagaaattcgtgcaaaacatttctataggctgggcacagtggcttacaccaataatcacaacactttaggagttcaaagtgggaggaccacttgaggccaggagtttgagaccagcctaggcagccttagtgagaccctcatctctacgaaaacatttttaaaaaattagctgggcatggtggtgcatacccgtagtcctagctactcagaagcctgaggcaggagaatcgctggagcccgagtttggaggctatagtgaactatggtcccaccactgcacttcaacgtgatcacaaagggagaactcacctcttaaaaaaaaaaaaaaaaagacaacatagtgattcatagggttgacctgacttttcctaggagtctaatggacagctgcttagccgctgatccagcgcttggctgactgattccaggtgccagaatgtgggacagctgtgctctgagagagagtcctctgctcactcaggtgcagaagacagtaaagactagaaagttggttgatgattgctggaataaaggatgagaaacttgaatctggtactaggcccacacaaattcagttactatgtgtcacttcctgttggctatttatttaaaattgtaggacttctggacaagatttgcaactgtggctgctactgtatcaaaagttacaaagtaactgctaagtagagcctttagtttgttgttgttctggtttattttatttatttgttttgtttgtttggttggagacggagtttcattcttgttgcccaggctggagtgcagtggcgcgatctcagctcaccgtaacctccgcctcccaggctcaagcaattctcctgcctcagcctcccaagtagctgggactacaggcacccgccaccacgcctggctaatttttttgtatttagcagaagcagggtttcaccacgttggtcaggctggtctcaaactcctgacctcaggtgatccacccacctcagcctcccaaagtgctgggattacaggtgtgagccaccacacctggccattcttgtttctttttgttttgttttaaaattgtatattttggatcagtttgcatctctctctctctacagggattggtttgagcattgtgcaggtcccaactgccaaggctcatggtccttctgtatagatgccacaaacctacagttaacacagcaacctttctggccttgccaagtgctaagagtggttgcaatagggcctaggattcagaagttgcactgggcagtcagcagggcccatgcccctcaccagctcttctggaactattttgtttttttagcatccaagtgctttacaccttgttctcatttgggtggtcaagccaagggttgttgactgaattcgtaaaagcaccttacacatcagaggcactaagtaaatgtgtataaatcctggacaatacagcaatagtgatggttaataacaatggttctcatttattgagcacttactatgtaccacacaccatgtgaagcgctttacctgagttatctcatctcaccgtccaaccactgcattaagtagatgctgcagtagcccttattttacagatgaagaaagaggccaaagagcttaagaatttgcccatagtcatagctgggaagccagaggcaaggatttgattccagggtagtctttagacaaagacctgggcagtgaggaggtacttcccaaagacctgggcagtgaggaggttctgggaagtgaggaggtactacgagttgaaatgagaagatagatgtcaaggccagtttagctcaagattcttttttaaagaaatggcctttcctgcctagaatgatcctgtttcaaacagcggcccccgccccccccaaaatttttttttccctttgcagctttggattttagtaacaccaacaatatttcctggagaaatactccagatgcagttttctggtacaagggaagctgttttcataccgtaccagcatttcacagtttaatgccgttgggtgagggtggcggttgttattctgtgtttcctgctctcagccagtgtgtggttcacacttgaatttggcaacagtgtggttgtgttttctgtgcatcacttccctgcatggcatcagatgggccttctgattcttagaaaacgcaaagatgtggtcatttgtgtggctggaaattggcatccctgtgtgcgcgttaagaacgccaggctgttgcagcagaggaaaacaatagggaccattttaaaatgagatacaagtgttcaggtgactgttgctgtgggattttaactctggatgaatagcttgctgttagggtgggtactgacagattcctggagctcttgttctgatccttgatcacaaatgctttccgtctagattgacaagttgaaccttcacagcaaccctgtctggtgggcgccactccacccattttatagatgggaagaccgaggcaaggagaagtaactcaccactagtccctgagccagtaggtggtaaaatgagatgtggccccagatagcaaggctcaagagcccctgagcctactgaactatagggctagattgacgtattgggaagtcttctgaataaattgcttcttcctctcacttgttttgctagaaacataaattaatgttaaaacatcaacctgaaacgtgtatttaaaaacctgtaagatattctcaagataatcttcagaaatatgtgaaaaataaaatgttaaggatccttaaggatgttcacacaggtattatttctaataacaaaaaattggaactagacagtaaccaaaataggggtgtggttaagtatattctgtcacagccatataaggaaaatgtatagagcccttaagatgatgttgtagcataaagtttatggacatgggaagatgtcagttacaagccattgctactgggcatggtgatgagcctgcaggcccagctcctcaggaggttgaggcaggaggatggcttgagcccaggagttcgagaccagcctgggcaagaaggggcaagaaggagcaagaggaggaggtgaaggagacaagctattgttaaataaaaatagtagactttttaatataagtattatatgatacaattctttctatatacacacattcgtgaaagaacatttctaggacaaatgtcaaaatattaacagtatttcctttaggtgttatggtctattgtgatgttcttcattcttttgtgactttctcattttccttccaagctgcctgcaatgagtaaggattaggaaaagaaatttttaagaccaaaataaaccttggcctcagccagaatcccttcctacccaacctgaaacctcagggccataaatcgcctgctgcctcctcaggtggacatgcttgcttccaatcgaaatacagtggaagctttttccatggccaaggataggcccaatggctgttctatcccatagcaggcagacgcctgagaccctcgtttgtgtgttatgctctgttgaagatggggcagaacatacttcccagcagctgtgaggctgagacgaggtgagcaagtccttttgaattctctttcatgcattcattcagcaaccttgtatcatgcacttactataattacgtgattaatcattgcaactacatttatgtgattcttctccttgccaggcactgtggtagatgctgccttataccagtgcccaaggcggctagcatacctgcctgaagttagagacggggttggggagacagctgtcctttaacaatggagagatttggactgtcctgggagagacagagccctatgaagaccatcatgggaacatagagcctaacacaggcactgtctgcttaactagacagacaagcccagttccctctctccttccccctcccaatactgtccccagctctgcccctggatgctcttccccattcccctctgctgtggtctctcccccgtctcttccctttcctctttcacaaaatgtctgtgcattttttttttacttaaaaccactacgcaaaaatcataatttaagtcaaaactgggtcgattcaacccagaggggattttgcatgacattctcaagaatattttcaatttgtctaatatcaattgtctccccattcaggtgggctcacactcttgtgacgaaggtgaagatttaaaaataatttattcccatgtagccacaggaaatcaattgagcagagaaaggattgagcagagcaagcgagatttagttttcattaaaataacacagtacctataaataaggtgagaatccagttaatagctttctattaaagtggagttgacggaaagaattgcattggaaggattttgttttgggactccgtgaggatttaaacattcccttcctgtctctgggtctctgtgcattctgaagtttgaatcatttcatttgtatttctcttttcaatttgctaaaaactattcttaaagttgcatccatttgtcgcttcttgttgggtaggaataaaagtcgatttctgatcccctcttatatgaaaaatggatgcattaggtccaacatctgaggtcttcctctggccagtcataaaacaatgacaaacaggctgcttgaaaagagatacgagactgggcgcgttggctcatgcctgtaatcccagcactttgggaggccgaggagggtggatcacttgagcccaagagttctagaccggcctgggcaacatggtgaaaccccatctctacataaataaatacaaaaattagctgggcatgggggcatacgcctgtggtcccagctactgggaaggctgaggtgggaggatcatccaagctgggaggttgaggatgcagtgagccaggattgcaccactgcactccagcctgggcaacagagtgagaccctgtctccaaaaataaaaataaaataaaagagatatgagcaagagaataaaaacagagtgatcggggaatgtcagaccaaaacaggattttcacaagtgcagcttactcactgtagttactgcatatcagaatcatctttggccagcatcaaagactggtcttttcttgcctgaaagaatccattattggctatgttgaaaaaattaggtcatgtatagactcttaccatcttctttcctcccaactctcaccaggtctggggtcaaagatgtgggttctagccgcagtcctgtcctcgaagaacagatggccttagacaggtctccaggtcctcagtttctctactaagaaaatgtgccagtgcccaataaggcacgggaagggttggttggttcagcccgttctgaactgcctttcagctctggatgggctgtgaggatgtgatgttctgtgtcctgttgtctttcaccagggaagggtgcctagagagggcgtcaggtgggtgctaaagtgagagttagacttccagttcatccactgttagatgagcacaagccagcattccccaaagcatgctacccacaccaaccatttttctcttaatggtgatgtgtctattttaaagaatactgggggcgggggggaaaccaggcacattagaggcacaatttttttttttttttttgagatggagtctcactctgtcgctaggctggagtgcagtggtgtgatctcggctcactgcaacctccaactccctggttcaagcgattctcctgcctcagcctcccaagtagctgggattacaggcatgcgccacagtgcccagctaatttttttttattcttcatacagttggggtttcaccatgttggccaggatggtctcgatcatctgacctcatgatccgcccgcctcagcctcctaaagtgctgggattatgggcgtgagccaccgcccccagcctagaggcacaatttaacacaggtattgtcacctaagggcaggacaagggacaccaggctttggcaaccagcctcatgcagaccagacgaattccgagtgtgtggcttggtacttggatgtgtgacaatgtggtgagtgactgctgtttaggaagtcactgcctcaggaaaccctttctctgctaagctgcagattctctgcagagcagtgccacactacagaccagacctcagcgtgtctccttgttttgactttatcatcacttttaaatacatacaattgagagcaagatgatgaagtcattcaaggattgcatttcttcctgagtggaggacctggttctaggcacagcaacttcccccaaagcagctcctgttcaccgtctctgcagtttcacccacagagcgaacctcggtccgcagtcctcagagcgtgcagcccacgagcacagctgctccgacgcatgcagtgctccctggccagctcatcctcactctgaagtcgggcattgtccatccagacaatgtgtttgactgcctaccaccttcaagacattgcattaggaaccagggatttggcgtgaccggcaaaaatagctaacactttcatagcatttgcaatttgccgagtgatgttttcagtgttttgcatatattaacccactgaagccttacaaacctctgagggaaactgttgttattttacagaggagagaattgagacacagaggttaaataacttactgtattagcctgctctgacaggcataatgaaacatcacagactgggtgacttaaaccaggggtccctaatgcccctggccacagacccgtaccagtccctggccttttaggaaccaggccccacagcaagaggtgagtggcaggcgagcaagcattactgcctgagctccacctcctgtcatatcagtggcctcataagattctcacaggagcacaaaccctattgtgaattgcatatgcaaggatctaggttgcatgctccttatgagaatctaatgcctgatgatctgaggtggaacagtttcatcctgaaaccatccaaccccgcccctcccacccccatccattaaaaaaaaaaaacaaaaaaaaaactgtcttccatgaaaccagtccctggtaccagaaaggctgggactgctgacttaaaccacagaaatttattgtcttactgtcctggaggctggaagtccaagatcaaggtggctgcaggttggtttctcctgaggcttctctccttggcttgcagatgactgtcttgctgcatcctcacttggtttttcctccatacacacacatatcttatgtctcaatttcctcttcttataaggacatcaatcagattggatcaggccccgccccccaaagaactcattgtatcttaattacctctttccaaatcttatctccaagtacagttacattctgaagtgctgggggctaagacttcaacatataaatttgaaggggtcacagatcagcgcaacacgcccagtgtgacaccactgaaaaatggagggctgagattggaacccagaggccatgctcttaagctactatgccatacctagggtagcagtactatataatttatcctccaaattgggacactttgagagggaaggatcgtcattaatatttgtgctgggtcaacaggcataagatgaggctgtctcaggcacaccaggatgtgtggtcacttaaattacacaacttcttaactctgacagaatggtgcctgcccttgtggagtctacagtccactggatgggagacaagaaagtggcaatgctaatgcagcatgccaagtgtcaggacatgggggttttaagggaccatgagaagttgggagcacagagaagggcccctgatttggtctctgggggtcagggagggcttcctggaggaggcgacaactaagatgagattgatggataagtaggagttagccaaagtgaagtacatagtggtgagagctgagatggaatggataccaaggcctcaatctagagattaggcctctgggctcgggcacacccctactctctgggaccgcttatataaaatgagatacagtttacatcaaggatctgtcactttttcttaaaaagtcagatagtaaatattttagattctgtgggccaagaggcaatatcaaggatattacataggaacttgtatagttacttaaaacaaaaccatgtaaaaatatgaaaattattcttagctccaggaccatattaaaacaggcagctaactggatttggcccgcacatttatctcaaagtttgtggtcttacccagctttatggcatatctattcatcagaaagctttgccaggtattgtatagaccatggggcagggggtagcttgtatcatggacgtacctacattaaaagcccccaagagccagcaaaaacccatattcaaacctacctccactctccagccgcagtccagccccagccaagccacttaacctctctgaatctgtttcctgatcctgtggaatgtgggtaatagcactgcttctcagggctgctgttagctgccttctcattcctcttactcagcattcatcaaacacttatcctgcactgggcgctgcaccaggccccggagttcaaaggtggccaagatgccacttttgaaaaaaatgttttttgaatgtgttttttggttttgttttgtttttgtggtcattttcttaaaaaacctgggtgtggtcaagagcacagccccctgttttgacgctgcattagtggagggaatgagtttaacgaagcgggtgacttcacctgggtcacctgccaggattctatctggggtcacagttacttcaataaagtgaagcaggaacgaggcagaggggacatgggcctttgtgagaatgaacgatggaaactctttgaactcctgggatagaaaggccaagctgtcactagagctgttcgtgatgggagagtgattaaagctcgttggagtttcctgccttcttctggcatcagaactttatgcctgctctgtgttcggaaccagtgcagctccgagtcctgagctttgacgtgggaatcagatttccctgggcctgagtcagattctgggccccacagaagtcagtggctcccatttggctgagggggttcccaccggaccctttgctgggtagaaaacacagcagccaagaaagatctgttggtccttgagtcagctgttgagaaatggagccacaggggatgctggggggttctccgaagcttgacaccctgccttcagatcctggcatcatcatttggcaggaacacgtgtggcctttcacaagcaacaggatttctttgagcctcagctgtcccatctgtaagatggacatggtgttgccttcccaactggcttgccctgagactaaatttggaaattgccaacattcctcgaatgctccttatgtgccagctattgtggggagggcctcagctcagccccctccaaggcctgatagtttgaaggcactgaggtagaggttttgtgtctgttcctagaattaggcagtttggttccagaatcaacatccttaaccattagatgacactgtctgtgaagagaaagaaaactcatgaaaacacaattcacaacacaatgagtgtgtgtgtgtgtgtgtgtgtgtgtgtatgtgtccttgtggtttgcttattgaacaagcatttcctgagcacctactttgtgcaaagccatggaaacataaagatgactaaggcacagttcccagctgcaagcggggagcttccagacatttctatcttacctcagagctagtgataagaataggttccctcactctcacttccacccagcatgtgccttagcttacaattgatagatttttttaattctgtgaccacagagctctttgccagaaatgggggcgggggaaatccattacccagaagcggccccagctcccccttcacagccctcctttcttgtgggtagctggcattgccacgtacagagtaacttggacgtgacgcttcaccgtgaagtcacactcctggcctgctgggaacagtggggcagccctggaggagccaacccgatgaataacgttattggaggtgtccatataaagaggaccttgtgtaaataaatgatgtgaccctcccacccccactttggcagggctgcggagctgagaaagggaagcacaggaaatgtgtttattttgcctttgctgagcagtcgttctgagggtacacaatgcaacattaaaccccaggggagcctcctaggtatgttaactcgccatctgcatgctccctttgctgtgcaaagagcacagaaatggtttccaagccttctgtttggctcccacccaccctaccttttttcttttttccttttgtctacttgggaaatttttgaagataaagtgcagcagatgatataataaacactttttactcaccatcctgaattcacaaatgtaacattgtggcatatttgcttcagatcttttatagatctgcctatataatagaaataaaccatcagggtcaggcacggtggctcacgcctgtaatcgcagcactttgggaggctgaggcgggcggattacttgaggtcaggaattcaagaccagcctggccaacatggtgaaaccccgactctgctaaaaatacaaaaaaaaaaaaaaaaaaaaaaaaacatagctgggcgtggtggtgcacacctgtacacctgtactcccagctacatgggaggctgaggcaggagaattgcttgaaccgggaaggcagaggttgaagtgagccgagatcacggtactgcactccagcctgagcaacagagtgagactcggtctcaaaaaaagaataaaataaaataaacaaaccatcaccaaggtagaaatctcttttgaatctcctcttctccccttcatccctgcctctcaacctcttatgaatttacaatataaattccagtgtttgttttatactgtgactcctatatctggacccagatacaatatgcaacacaggtttatgttttcataatttatgtaggtgctatcatactgaatatattactcttcaatttgcctgttctgtacaactatgtgttttgatgtccagccctgtggatccctcagtctgttccaattactgtatcatgttccatcatatgattatattgcattctatttatgtatctacctataggtagacagataaattgcttccatttttttatcattatgaataacattgatcaaagcatcctggtgcatgtctgccttcagatgcacaagtataagtgtgtccctatagtgtgtgtctcaggacacccgccagcagtggatggggaccccgatttccctgggtcctcctcactgcttcgtgttgacatattgtgatagttaattttttgtgacaatgtgactggattaagggatgcccagataactggtaaaacattatttctgggtgtgtctgtgagggtgtttctggaagagattagtctttgaatcagtagactgagtaaagaagagcttcctctccagtgtggccgggcatccttccaatcacttgaggccttggatcaaacaaaaaggtggaggaagggccaattctctcttttcttgagctgggacgtcggagctcctggttctccggccctcgtatccagactgaatctcaccaccagctttcctggttctccagcttgccaatgacatatcatgggacttcacagcctccataatcacacgagtcaatttccataataaacctcctcttatatatgtcttatatatcctactgattctgttcctctggagcaccctaacacacagatgttttgtatttcttcccaactaagtggcctctccattgaaaaaaataagaaaatttaaaacaaggagcttgctcagaagtggcatgacctgcccatgaaaaggaatgctttgtaaatcccagagttcaacatcatctttcctcagggctcctggagattctggactcaggagcacttttcttttcttttcctgggaccatgcacagtggcatggcatgtcagcctttgccaagtaaagggcgacttcctatggcatttttgaccaagtcttgactttcttacctgggtcatttaagaatatttgggcctcttctcccatctgctgtcagcacctggtccaagcctcattactcatctcttgcctggatgggtgccctgtgtccttactggtctcctggcgtcaatgtcccctagttgaatgcatcagcatgtttatttcatgcagtcacatatcaagccatttattcatccatcattgactggagccctgttcagtgcacccctgtaactgttgctatggcctctcattacctgcagaacccaacccaaatgccttagcctggccatcaaggcatttcatcatcccaacctcaacccatttctccagcatcatctccatcttctccacctcctcacccacatgactccaagcacttgatgacaatgttcttgctccctctgccaatgttccctgtctctacttgtgaaacactttcctgtcacctagaagtcacttggtaagctcagttcttacccagggagctttcctcgggctccagtgcaggactatctttttccttgtctgcttccgtagagttatctacctatcatcacctgtctcttcagctacagtgcgcgctctgtaattccaaagttctcacccatctctgtagtctcagggctaagggctgtgtctggtatacagaaggcattcaattaaagcatattggtgaatgtctcctgaccttccttcctgcacttaccagctcggcataggcagtgctaccactcaactgtctgttatctgttagaaagtttttctgctgagcaaattactggagacatgattgaaggtttgtttaatcttgagaagataaattagtatttcaagagtttaacatagcatgtgcaaatgaatattctttattattaatcaggaagtcttatctgtttactaaagcaagcactgtttacttggaaactcttttgaatttactctttatacttaaaagtaattcaattgaatgtgattgaatattgtctttaattctgacgtagctagttaaaaaccaagcttttcctaatcaatatgaattagggaagactcttcactggctatctggccagtctctaagaaggcacaataaatgactcggctgcattttctcagctcactgcttccaaaatgactagttgcattagaatcccctggaatgctggttaaaatacaaaatctcaggcctcaccctagatctaatgaatcaaatctttgggtggggcctggaaagctgtatttttgtagatgttccccacatgattctaacatatactgagattgagaactgtacatacagatctgtgctttccagtatggtagctcacgtgtggtgactgagctctagaaattttgccagcctgaattgagatgtgccataagtataaaatacagatttcaaagagtacaaagaaagtaaaatatctctttcattaatatttgttaaatattaattacatgttaaaatgatattttggatatattgagtgaaataaatgattagaatttattccacctgcctctttttgctttcgaaggtggctgctagaacattttagattgtaagtgtggcctgcatgatatctccctctatgggacagcactggtctcaattgtagggtcactgaggacatggtgcttccctcctggtggctttcggatagttggtgttcattgaatgtcttttgagtggacaaatgagtgaatgaggttgacgcataacacgtggtttccacttacctactatgggacctagacaggctgtttcacttctcttatatctgtaatataagcagagtaactggagcccttttgttcacctgcagttggatctcagtgatttggggaaggatcttgggcctccacttgcagtgactatagtcactatagcttcatcagcaggggcgggaaatgatgctgcctccagcttgagagtgatgaggccagcacctcctgggagccctcgataattttatcttcttttgcaatccttccccaaatctcttggttccactcaaaactaggaacagtcctgcccactgtggcaagctgtggtgcccatctctcttacagctgtccccacaggactactataattattcacttttatcccattgcctgtaatgcatgactcaactctagaaataccagattaaacattttcttttacatttaaaacactggctgtattcaaatactacccatctggttttttttaaatcagattagaagtaaatgtcttattcttccaactaaattccagtactacaaggatagcaaaacaatgaaacagtaatacactgggggtgtcgggaatgcagcaataaacatttattaaaaatactgatagaataaaatttttaaactaccaaaaataaaaaagaaaatcatatgaacccattctgaaatccccaaagtcctggaatacagaagtgcctgcctccttcattattccacaggagtcactgtaggcttaaatggctctgaaaattacatatttactatggtggtcaaaagagcagtcttcaaaatccaatcatctaggctcatatcccatccctacatcttactagttatgtgactttggacaaatgaactgagcacctcagtttcctcatctgtaaaatggggataatactagtaattagctcctgtgtaagatgggagggttataggtgactaatgtatgtaaagcaattagcgtggtacctggcacctggtaatacattcatattgctattgattgctgtttcaaaaactttttctttttggcacctactctatgccaggtattattggatatcacccagtatcccagagaagggaagctttttgggagaatggcataatgaaaggattaagatgtaaaccgacatagattcaaaaaaggaaaagttgggctgggcgcggtggctcacccctataatcccagcactttgggaggctgacgcaggtggatcacgaggtcaggagatcaagatcatcctgaccaacatagtgaaaccctgtctctactaaaatacaaaaattagccaggcatggtggtgcacacctgtagtcccagctacttgggaggctgaggtaggggaattgcttgaaccccataggagctggacaggcaaaatatagcaacaacaataataacaccagatgcctgccatagtccagtcccatgacacacacagtctcatctcctctttataacccctccatctgacacagatgaggctcagaggggttgagtaaccgggccaaagttaactaacctgctgctaagtggccaaactgaatccaaacccatgtctttctgcccagaatgtgtcccctctttctactgactcagttctctccattaaagagatgggatcaatccctttgatgtatctgaaaatctgtttcataataagacatctcttatactcaatgttattggggacaggcaaaaataaatcattgaggttgaaatgagaaggtccctgctttctgtgagccccagactgaccataggtgcatgaagtgaacccggcgggcacactgcgtggggtgggctaataacctccagtacgagaggcccagatctgagaagatggggcgggctgcctgggagtacagagctccctgtcactgcaggagtcaagcagaggctaaagacacagttgttcaggaatgttcggcattgagcagactagcaggatccctccaggtgagactttaggatgctctatgacattttcaaagaccattggagaaaaagtatctctaccccgggtaactcatagtgtttaattcaccctgccatcttaccaagccatgggaagtagggggaagcctggacttgggctgccccaggccggtctgtgtgttcaattcaggtgggactgagcagggaaggtgcagcctgatatgcacttgggtgctggacatggcagggggcacagtgactctggctgtgttcccctcctgccagtattgggctcccaatattgcttcaagtggagttcaccttggtttggggtcagggagggactgagaggcattcatttctggcaggcagccaggctggcctcacaggttcatgtgagctgcaccaagcactgccaagatcaccttgggttctagaagcccatcttttattcattcgagaagcaggccgagagactctgctctatgacattttcaaagactgttggagaaaatgtctctaccccaggtaactcatgatagtgtttaattcaccctaccatcttaccaaatcctccattgcccatttcaaagaaatccctataccagcacatgctgggtgcttgataaataataataataatagctaacaattactgagtactactgcatgccagacacttctaagtcatgctctgtgctatttcattcacttctctcaacaattctgtgagactgcacagcagctctaatttgtagatatggaaactgaggcatagggaggttaaatcatttgcacaaggttcacagcaagcaagtctgggaacctgggtggtcctgaacccattctgtgatgtcaactgatgggacatgggaggactgcacccagctgattcctcacggtggtcctgaacccattctgtgatgttgactgatgggacatgggaggactgcacccagctgattcctcacagtccctcaggaagctgcagggagaggagagacagccctttgtcccagtggttgagcgactcccccgcactggggcaaatcatctctccctccccattctctcagctccttcccagattccaccctgcccccagcagtctcttcaagcacgttgtgaacattaagttatcccctgctattcatctgagctgatgttggctcagacagtaccaattcgacgtttctccaagggcggacagcgggtcggcgagagtcgataatgggttccagcagattggacgccgttcagatctaactcgagcctggcgccctttgcagacttggagtccaagtcctcctcatgccttagcagcaagttccaaagcagcctggaggggacggcaggcgtgtggtcaccactgacctcctggccccacagccccacacccacactctctaggactaatcacacgcaatgctggcttctcgcattccccagtgactttccctgtcatcttgcctgctgcgtgcctgctggctcatgggaactcaccggggcggagactttgtctgcttcctgctgcatcccctgcacctagcacagtgcctgggccatagtgggtgcaccctagagtatgtgctaggtgaatgcattcataattcctgttcttagcatgaggcagctgacacctcgggcctctcggaccccagacttgttcccgcagctgcctcctggccatctttatttggcgttgcaaatttgacaggtctgaaacagctcagatatcccacctcaacaaatgcaacctggtcttttcagggtaaaatcctcagaggcctctgtgacatcctccttttccatgccacacgtttagcccacgcaggtcctctcagctctactttcaaaggagatcaataattcaaccacttccccccaccccggctgccgtctttcttctccagtctcacctggatgaacccatcctccacctcctctcccacctgagaacattctactgccgcagccagagctggtctacagcgtaagtcggatcatgttcctcccacactcacacctccaagggctcccagctcagagtgaaagctcagagcctccttgtggcctgtgaggcctggcactgcccactccattccaggctcactgtgtggttcctcgcatgtaccaggcacatgctaagcacacaccaggcacatgcctttgccttgctgtcaacgctgcctgtaacacccttcctccaggtttccccattagttccctcacttccttcaggcctctgctcaaaaaatcacttatcatcgacgcctggttttgaggatggatgagtttgcatgtgaggggcatttagaacagtgcctagttcaatagctggtagttacgaccgggttcttgtaacggctccttagggcctggttcgtagctgattctccttttgttgaatgggatatgtgtccagggcctggtccaatgcctggcaccaagtgggaagtcaaacgttcgtcgaacggaaggtgtagagacgagcctgggaagcaatgcacacactgcttagttcaggccatgggaactggacagtgtgagagaaaggtgacagcccgtcacttcgatatattctggaagcaaactccttccacccctacctccccccactgtctgtgtcacttccctggggcctaacccttgccttctggctccgtgctcagggagacccaggaaggccagggctgtggtctcctggaaggaactgggctccagacctggcttaattggggcgggggaggctgcaggtgagggaggaaggggaagctgcgggagccgggcagcagcccctgcagaggtgagaccttgtgttgggctctccccgcctcacctgtgttgctcaggttctgcccaggcattctgggaactgctgctggttagaggagggggtgggacccagctgccttgaccgtcactgcttgtggcctttctctgcctctcagctggaggctttagccagaagagtctgagaatgaaggccatggcccaagtcttttgttctctttccagggcataaaaaccttgtcaatctgctgtttagagtagttcaaaaaatacaaacagctgttgtccctaaccaaaatcatgctgctgatagccccagaaccctggcctttggaggcctcagaaccccggcctttggagggctcagatgcctggctcatttgttcttggtggcttggccccgaggtatggaggaaagcggaaggttgttgtcacatcccgcatcatccggccaccttggcccctcagtactcctcctggggcactgagaggagcgcacccagcttcaatctcaggggacttgacaaagggtatttagtggcataggtttctacctgtttatgttccgtatgccttagtgtgttgagaaacaaaaagcatggacattttttatgaataatattataatatgaaactctccttcccctcagagaggatgggccagctgtttggcagagaagcctctctgctgattaataacagcaccttcacactttctttaggcaaaatgtggagaagtgcttgctgcctacggagcctgcttttgggaagatcttggtgtgggtcacctggtgtatacagtgttactgtttgctaagtggaagcgtcatggcctggagggtttggagccagggagacccaggcttcggctccaaattcatcgctgattccctgtgttgccttcacctctcagagcctccgttttattatctctagaatgggaatgatagtaaccactttgcagggtttctatgaggaccaggggtcgcaggtatgtaaagggctcagcacatcccaggcgcctggtaaatgggagctgttattcattgacctgggcaacagctattttttggagcaccaactgtgccttagatgggaaataaaataaaaatctctgcccttgtggtgctcacactctagatggggagccgggtaataaacagataagcaagcgaaatattaatatatagcaagtccggaaggtaagggctgcaggttaaataacgtgggcagggccaggcgcggtggctcacacctgtgatcccaatatcttaggaggccaaggcaggaggattgtttggggccaggagtttgagaacagcctggccaacatggcgaaactccttctctacaaaaaatacaaaaattagccggtcatagtggtatgcgcttgtaatcccagctactcaggaggctgaggcagagaattgcctgagcctgggaggcagaggttgcagtgagccaagatcgcaccactgcctgggagacagagcgatactctgtctcaaaaaataaaaaaaaaaagaaatttaaaattaggcatggtggaacatgcatgtagtcccagctactggggaggctgaggcaggaggattgcttgagtgcagaagtttgaggttgcagtgagctgtgattgcaccactgcactccagctggggagacagaatgaggccctatctcaaaaacagatagatattggtgggtacagtggctcacgcctgtaatcccagcactttgggaggccgaggcgggcagatcacctgaggtcaggagctcgagaccagcctggccaacatggtgaaaccctgtctctattaaaaatacaaaaattagccaggtgtggtagcgcatgcctgtaatcccagctactcgggaggctgaggtaggaggattacttgaacctgggaggcggaggttgcagtgagccgagattgcaccactgcactccagcctgggcaacagaatgagactgtctcaaaaaaacaaacaaacaaaaacagataggtagataggtaggtacacaggtgggtgggtgggtgggtgagtggatggagagggagagagagagagagagagagatgatatatagagtggtcagcgaaggctcactgagtagatggcatttgagaagcgaccccctggcagtgagggagatgaccctacctacaccaggagacattcactttctatccctggagaggcagcccccagccttgaatgactttgggggcaaggtctcttttcactgtttttgtctcattggaagtgggctttctgacacgaggctctcaacaccacctgcctggcctctccccttcattcctgagccttattgatcaaccaaattgccctccacaaactcagctatcttctgtcagactaatgttatattttaatgtcccagggggaaaaaatgagtctatgccactgtagagctgccacattttaatatggagaacttggggcaaaatgtagctgaaaggggagaggagagaaggggtcgggaggaggatgggatcacagcgaggctctgaattgaggtccatttccaccctttggcggcatagactggaaagaaaatacgggacagtcgtcctcccacctcctgccaaggccacctccttctcatcatccgagtctcagtgcaactgtcacctcctcagagaagtcctcccagaccagcccactgcagcaccttcccagaccctgctaccacctgaaatgatggaagtgttttaggttggtggttcattttctccgttagaatgaaagtgccaagaaggcaggaaacttgttttccaagaatctagaaaagtagttggcacaaagtaactgctcagtgctcatttgctaaatgggtgggtgaaaccccttcctacagagtcggggcaggggtcccccagccagcgtttttcaaagtgtagttcatgtcccacgaatgggctgtgatatcactttagtgactcatagttactggcatttaaaaagtgaaatagaaaaaataaaaaatagcgcacactacacatggtaaggataactgttgttttaagaaatatatatggaatgatatactttatttctcatgtagtagtcaaaaaatttgaaactcagcagtgaatgctaagttttctcagcctagatgacttcaaaaggaacattcttcccctggagactgtaaacctagtcgcataaagtttacattctggggccccaaagcagaacctgaagaaaagattcctttgttttctattagctgaaaaaaatgaataactttccactgtaggggacccagtctcctaaatctccactgacatacatgggatcatttacacactcacatacaaatgcacacacacacagatacatgtatcatatatacccactgacaacgaggacacatagacacatacatacatgcaggcagatacatccatacattcaaacacacacaggtgcaagcacacagcagtgcactcacagatgtgtgcatatacaaacacacatgtgcacatagacacatgcaggcatgcacacagatacaaacacatacagactcatgctcacaagcatgcatgtgcatacagacacagttttattcaacacatgcacatacacacaacacacatgtccatacacaatcatccttattctgttccatgcactgacaccttctcctccccggggagattgtcgggccatgttcagatgtgcaccctggcaagggagagtgtggaacacagcctctctactaaccaaagtcagtggggtgttaggggtgggtgcatccacaggctttgcagttaggccaacttgggttcaaatctccacagagtgactgagtgaccttggtcaggttactttatttcacagagcctgattcgtcacctgagaaatggggctgatgacagtcatgcctccttcccgggggcggctgtggggatgagctgggagcagggttgtcaaaggcgccagctttccctgcaggtgtgtgggacccacttgtgcccctgcccagctgtacggcattggaccagctccctgggcccagatacctcttttgtaaagtgaggatctcctatctctggcaggatcctggtgaggaggaaacaaggctctgtatgaggagtgacagctccgaggctggccaagcttgcaaggtgctcagggtgtccctactccgtcctccaaggcttcatcttcctccaggtgccccctcctagccagcccaccccatgccgtcctcaccatctctggggtcacacggaagccaggctgggctcccctctgacagggacgctctctagaaaaccacagtctgggccatgtagagacatccccttgaaatgccatctgtgacttctcagatgggtctactctcgctccatcttcccccatctccagaaggctccagcacgatgaccctgtattacctgcgatgcggcaggggcccctcgggtgccccagtgagcatcggttgaaaagtgtgtcattttcaccttagtagcttcatagaatgtggccttacggagaggagatgacaaagctgtgaatgtagggaaagagaaaggtcatggggcaaggaatggggatcagccatcctgggcccaaggacagagcatgttcacatagggcacccgggatgaggaggagcaaagcaccaagacccggtttcggctttacatttgccttcagagcaagacaaagcagcagatgtcaatgacaaagaaactgcaaaacaaagaaatgcttaaaacttgaccagaaagcaacagagttagcctgccatctgatgctgcctcctggccctcctgtggggacctacgagccccctgcacccacagcctcgcccccacacccagggttcgctccagggccttctctctctcctcagcttcctcctgtcatcaggtagcaagtacatgaggctctgataggagccaggcatgtggcaggtggctttggggacaggaaagccaaaaggcagacgtggccctcacaggctgtcgtccggtagagggacaggcactgtcctcatagtgatgcccaccattgcaaagcatgctggagatttctctgccagctctgggtggggccggggagctggagtgagcttgtgcaaatgaaagagttgactgggaacatcttatttaatccttaccaccttcctttgaggcaggtgctactgtgacctgccgagaacccaagactaggaagctgcagagttcagccagcccatgcggttctttcattaagaagcccgtcgcagggcaccctgcggtccatttctatgaaatgtccagaataggcaaatccgtggagacagagagcaggtcaatggttgcttaggggtagggggatggggacagagggtaacagcgaaagtgggtggtgggtacaaggtttctttttgaaataacaaaaactgaaaaccattgaataatgtactctaaatgggtgaaatgtatggtatgtgactcatatctcagtaaagctgttattcaaaactttcagctgggcatggtggctcatgcttataatcccagcattttgggacaccgaggtgggaggatcacttcagtccaggagtttgagaccagcctggggaacacagccagcaagaccccatctacacagaaattcaaaaaatctgccaggcctggtggcatgtgactgtagtcccagctacttgggaggctgagtgagagaatctcttgagcccaggaggttaagtctgcagagagccatgattgcgccactgcactccagcctggtccacaaagcaagaccctgtctcaaacaaaaaaagaagttttttcatgtgaagccaagcccttgattcctctgtcagctggcctgtggctgcagcgaggagggagggagaaagggaaaagatgcacaaaaattcttgcaccgctggcgtggtcttcagttggtgctggctgtctccagactgggcagacattcccagcaggctcttttcttcggtggcacttccgtgggctctctggggaatcagtttccttaataaggcttcattcccgcttgcggttcccaactcattcctcagctcctctaggactggaaatccatcctatacccttccaggggacccctcctcctggacaggcccaagcatgacccctccctggagcaaggccccctctggtccacaagaagctacattcatcttcttcctggaaggtctgggagggccagctgcactccagcttttcctttgatgttagttagcagtaagtcacaggtttgagcccccagacgatgagtaaacgtggcccctcaaactgtaagggcacatatattaggctcttcagtgatttaacctcccctcttctatttaacacatgggaggacatctcccaggcttctcccataggtatatgggcaggtgtgacttccagctctgaagcatctctccagcaaacttctctacagcttctttccccatctcctaaaatccaacccttttgtgctccatgtgggcaaagttgagtgggactgtggttacaagttgagagtagttcaccagctattagcctctatcgtagagtctgcttttagtccaggacctcttttggatcgagcatctagtatattttgatgttttagcaaaacttccattttaacatcctgttgcaattatcaaatatttgcgtggggggtgtatattctttcttcttccctagagcaactgtgttgtgtcatactcagtaaaactgtattcatgccaagatgggcttgtacacagagcacatttcctgagatgccctgtggatgcttttttaaatgtcccttttaaaacagtgcctgaagttcgcagatggatttaatttttttcactggtttatagatgcacttcctttcataggcagtccctggcactttcttgccctaactcttgcataggttatatatccaaataaaaaatgcttcttacaaaaagaaagaaaagaaagctgacgtttcagcgtcacatggagatggtaggaaatagaattagaaatgatccctccttcccttatactgtgaataaacagccaggctcattttttttttaaagtccttaatggcgatttcccaattaatcttgggaacgacccaaggacaatgtcagccaatttataattgaatccaaagtgggggatggcaggagtgggaagtgagaggtttattctcttctcagccatgtgcactgacatttttttaagcctacaagggtgaatttaaaagggcctgagagggtgaagtagaggtgacagccagattctttaaagacaagtgatgctttaaaaattaaaaaaaaataaaaaataaaaaactttggaaggaaatagctaaacaggacttagatgagtcttacatctctgggttccaggtccacctggggctcaggattttacaaacttgcactgtctcattccaacaaggagaaataggaggccactgaggcagaagaagcttccgggaggcttcagactagtccagctggtgctgcctctgaccacagtttagctttatgggagggacgggacaggcagcacctgatgttggaaggagaggagtgttctgggggaaaagctgagtctcactgggaatgtgttgattgggtaagaacacgttaaggttgggctggggcaggtcaggaatgagtggttaggatggaaaagtcaagctgggagctcacacttatcaagtgttcaccatgcagaaggcgcggggtgagcatttgacaccaactgtaccatttggtttctgtgaggtgggtactgttactcctattcccatttgacacctgaggaaactgaggcccacataaacacaacatcttgtccaggtgcacagccaactgaggggtgaaactcaagtttggagtgtgccttcagcatctcaccttgactcctcatcttctgtaatgaggtaacagacaaagggaacagatagtccattttgatctcgtatttactgtgtgccagtataaagcgcctcacagcagccgccccttcttgtacaaccacttctttacacgtgaggacattaggacccagaaaggtgaaggaacacacagctagaagatggtggagccaaggtcaaaatccaggtctgtctgtttccaaaggccaggcagccattttctcccagcccctgaactccattcggagttgcctggaaagcatttggtgtgaaggagctggccacgtctacactaatcagctgttaaccctcagaactaccagccgagagaaatcctggtcggccagagcctcagtccctgaacagtccccctgacattgcatggaaattcctaaaaccaacgtcatcattcttgaaacctccctctacaacaccataaatgcccttttctcctgggctgaatgaatggagaccgtttctcccaatttatggggtgatgccagtttggctgggtagttctcataggccctgaccctggcaacttaaagtcttccgttatttggctggggacagggggattgttattttaggagacaatcttctattgttctgtgcaagcaaaccccatcccccttcccaccttcccctccaggacccccgagataaataagaaaatgcactcattaaacaagtccaacccctaattcatgcggcttgcagtaaggacatagggaaaatggttagcacacagcagcgtgttcttaaggatctgctggcagctacagaagacaaataatgaatgccttgtaacccagcctggccacaccattccaggagctcagccttatcaaacacaggccaggttgtagatatttccaccccgggccctcctccgaatccaataggtattcaaggatgtggctggactgcatttattctgcttggggatttgacatgacatgactgtctcccactctttagccaaagtgagacagtggattgtaggtgtatttgtgagatggagccctccaggatagaaatcagccaagctaagccagtgtcctgggaatgggactatttgcctgccttgcctactctgagcaccatcaatgtacctgcaaaatccaggtgggaaccagggtgtgtatagccaaatgtaaagaaatttttcaaaacggctctgtatgaagataaaagatctgaacagcttactctgcgtgagtttcgaatggcagctaaagggtaggtaacaggagccgatacctggctctgcacctcctcccaaaggagtcctgctggtgaaggatgccgtgctgggccactcttctgtttgccgacttggctgactcctgaggccaggtccacaccgggctatgtgtttcctgatttgaggccatttatcctcattaccccatgatgctgcagttcaggctctctcattgcagccagggcttcctaaccggttttctccccaggccagctcctatggatgagcagaggctgcctgaagagttggagcagcaggcgaggctagggtgtagagagatacgttcgttgcatttttgccaacccacccatagctgcccctttattttcattctggcagtgggttctccttgggttctccaacctggaagcagcttgagcagcctccctgccacctgtcatgtgctctaaagatgcctcctgggtagtaaggctaccccctgcctcccacctaagcatagctcagagcattgcaatgtgaccattacatgtccagtatggtgggttgtacaagcacatggatgtttatatatgtatctcaaaggtcagagcatgtgaagaaggcgcactgggagagtcccactaaggggagccccatccctgtaaacaaacttgttcaagtccctatcactgaggccccctccctttggctggggagtgcttcctgcttcctctcccacaaatgccaaaggatgcagcagattgaggcactggggagaaagtgcccagcctgggagattgtgaagtggagtgcaaagccttacctgctagtagaggaccatgggaccttggtcagtttcactgtctgcaaactgagcttgtttttcccaccatagtggtgatctgtcagggctggggcaaaggtcagaagcctgatggatgggaaagggctttaaaatataaaattgcctgataaatgtgaggaatttgggtttgcttttgtggaggtggtgatgatgatgatgatgatgatgatggtgacggtgatgatgacaaggacaataatgagctcagccagacacagcggctgcttgacgttcaccctggcaccacatgggaggcctttcttcacagtgagcttcgtggtgatgagcacagcacagcccagcgtagtgtaggatttattttaggtgcagcgtggggtagagataaaaagactacctgggttccaaatctgggtccaccacccagctctgtgactttgggctggtcactcatactttttgtgcctcagtttcctcatctgtaaaatgagaatgataacagtatcctagagtactcagtttcaaagaccatgggctagaactcaagacctaatgttccgatccagacccgaagcaagctggggtagctgacctcgaggcagagctgtgggaagagcccactcgtgacctggatgcgaacccttgacttgccagaagtccatgggcaagttctggctcctgtgccagccttagtttccacatctataaaataaagacaggccgggcatggtggctcacgcctgtaatcccagcactttgggaggccaaggcaggcggatcacttgaggtcaggagttcgagaccagcctggccaacatggtgtaaccccatctctactaaaaatacaaaaaagaaaaaaattagctggatgtggtggtcggcgcctgtaatcccagctacttgggaggccgaggcaggagaatcgcttgagcccagaaggtggaggctgcagtgagccgagatcatgccacggcactccagcctgggtgacagagtgagactctgtctcaaaaacacaataaaaaataaaaatgaagacagtaacggttacttctctcagagccactggaagggattaaataagaccctgcatgacataatcatgtgattattaagtgccggctgccaagctaaacactttatattgtctcaatcctcccagcgatacggaggtactattataagtcctcactttatagatgtgcaagtttggacatccagaggagcatgttgtaggtcacccagctagagaggtacaggtagaggaaatggacccaggccagggtttgcctggctgccaaaggatgctgctgccctaactcccaggagggcccccacatgcaccagcccctcccggcttaggctcctgtgactcccctccccctgacaggaagccttgccaccttgctgtccccacccctgggggatatcgctcagggatgaaagggttctggggctgcaggctgttgttggaataaatgagctcgtgtgtgtcgcgcctttctctcgttgagagagcatcaccctgtgcattctcgatgagctaacctgacctatagcagtattagatccgcgtttaatggacagccgtgtgctgcagagaatgaacagtcagtaaaggcctgttgactgtcagcaggctcggcttggctcagctccagcccaggcctggggtctgtgccaagcccagagaaaggtatagctcaagcccctagcttgggtggatctggtggtgctgtgtctgcacacggggtgccaagggctctgtcatatttagccctttgaatatcagccccagagccaatgtcgcagacatctgctttaaatggggactcccttcctttagggtagagagaaaccttagaggccagagtcacaccgtccttcttctctgggatggcccccatcccttgtcatttcagatgcagcatagtatagtgatggaagcactgcctgggttccaaatctgagtctacccccacccagctgtgtgaccatgagcacctcatgcaaacactctatgcctcagtttcctcatctgtgaaatggggatgataatgttcctttcctcatgagtattgtgagaagtaaacgaattaatatatggcacattgccatgcacgtagtaagtacagaagagtgtttctatgatcgtctcgcatccatacctgtcgtaaattagtgtccacttttggctgtgagtgccatgagggcaggggatggcctgtcttcttcattgctgtgtcccaaggaaagttctcaggaaatatttgctgaatacatgaaggatgcatgagcaaacacatacgtgatcgctcccaacgtgcctgggggaggcaggggcagggtctgtgaatgctgctcatccacggagggcttcacaggcccagaatttaccttagattcgaagacgaaggaatcatctggtactatcttagtttcctattgctgctgtaacaaattactgcaaacttaatggtttcaaacaatacacatttatatcttatggttctggggctcagaaatctgatgtggatctcactggctaaaatcaaatcaaggggattattgcttcgggggccaccttcattccttggctcatgacatgcttccatcctcagagccggcaatggccagtcaagtccttcttgcatcttatcactgaatcccctgcctccctcttccacgtttaagggacccttgtgattacagattacacaggacccacccacataatccaggctaatctttttattttgtggtcagatgattagtagccttaattccatctgctaccttgattcccccttgccatgtaacataacgtattcacagcttctgcaggttaggatgtggacatcttggatgcaggaagagcgggaggttattcttccaaccacagggattttcagttagtcaggaagatgggaaagtgaatgaaggaattctccatttagctgccccaaaaccattttgagagggaaaggacttagaccagcgcttccttcagtaggtcttcatggtatctctttctgaattgcatggctccaggcttcagggatttttttagtcattttccggggatggtcataagtgccagcaagacaagcctcaataaaggccaataggctgggcgctgtggctcacacctgtaatcccagcactttgggaggccgaggcagggggatcatgaggtcaggagttcgagaccagcctagcaaatatagtgaaaccccgtctttactaaaaatacaaaaattagatggtgtggtggtaggcgcctgtagtcccagctactctcgagtctgaggcaggagaatcacttgaacttgggaggcggaggttgcagtgagccgatatcacgccactgcactccagcctgggtgacagagtgagactctgcctcaaaacaaacaacaacaacaacagcaacaaattcgctgggcaaggtggtgggcgcctgtaatcccagctacttgggaggctgaggcaggagaatcgcttgaacccaggaggcataggttgcagtgagccaagattgtgccactgcactccagcctgggcgacagagcaagactctgtctcaaaataaattaattaattaaattaataaataaaagtaaaagacaatagggcagtagcccagatgcagaatcaggacttgttcatggagcccctcccacgtgccagcgttggttgcattcagcagcggccccactcctgggcccatctttattgagcacttactatgcgaaaggtactttgccaagcatgagatgcccattccctcactaaattctcatgacagtcccttgaagtagtttcagttgtcagccccatttgacagatgagacagctgtggtacagaggggttttgtgacttgcctgaagccacacagtctgtcagtggcagaagtgggatttgaacccagggagttggactccagaatcttctctctttcctggcttgacctcctacttctctaccattcacgcacattgttccattgcagctgcacaaccaccaggtgaggacggaatttcgtttgaatccctactgcttagatacggagactgaggctgacaaggattgtgtggccagcccagtgtcactcagctgttcagtgagctgcctgggctctttctccacatcacactgccttccgtgtgttactaatgaagaatgaatttctagaaaatgaatattttcaaaacactccctgccacctgcagtccctttgaggagtggcgattgtttgtagttccccaggccccccatagaggtaagcaatcactcctactttagaactgaaattgggggcgtctcctccctgccacccaggactgtcatttagccagccagcctgaagactgcagcaagcaggcagatgcaatgcttgcgagagtaaacttggccagtctcccaggaactccttaatgaaaaatttcattccggtggacgagagtggagtcgacacagtcctcattactgcccaggtctaaattaaacaagacaagggaggttcttgaggagcaaggcagaagttactgaaggcttgaacagtaaattgcaggaaaggagcttctgtcggggaaggttctccgactttccagggtgcatggaaccccaatgcatttctcctttggaggatcaacggccacttaggttgagggtacagaatggggcacagtaaacccagcctcctcatccttccctctcttgctgggtgagggctgggctgcaggcgcggcccccaggactctgccttggtggctatggttccagaatggtgacgcccggaagcagacactccgcaacgtactgtcttctaggctgacagctcttgcctccccagcttgaatacatgctcagtgggccagggttgagttctggagtccccatgtccctttgtagtgacaccagcatctctttctagataaggggcttgcataaagaaatgccatgttggcttacaagtaggaaatcatgttctttcccatcaattggatttctaggtgaccacctgagatccgaagttctggaagtcaacacaccatccacccacgctccccttgcccacttcactctgtctctctcgtgcacaggtgcacgcacacagggctcaggctgcagtccgacagaaacataggcttcctgccattaattggagggccctgactgcagacacagcataactatctattcatagtctttttttaattctaagaaatgctgctctagctattacctacttcagggcaaatgactggctggcgttatcagcatttttcaagttataaacaccccctcttagctgggacccctctttattttcagtgttcttcagaatgaggagttggggcatggccagccggccctggctgtggcatggaggatggactggccctgggcactcagggaggggtggcgggggctgcaccccatggccaggggacagttacaggcaccactgtccccagatgccccagggaacactgtgtcccagctgcttctacgtaacaatccaggccatggctttccttgtcttgcacccatttcctggaggaaaagcgggaatggtttaggaatgggtccctgctccgtggctcctgagaagaattccctctctccagactaacgctggtgtccaggcacttttccgcctttagatccaaagctatggaggggcttgtaaacatgttgctttttgtaaattgaataagtggacttgtctagtttcgtaaacattgctggcggcatccggagccccaagaagcacgcttcctcctgaaacactgccctgcaggcaggacagctccccgactctggcatcagctgccatgtcttgagagtctactgtgtgccaagcattttacctgcagagtctaattttatcctcaatcttatgcagtgggtaccaggattttccctttttacagatgaagaaactggaattgaggaaggccgagttgctccccacagcctcacgatcgtgagaggcagggctgggactcatggcgtccaaggcgtttggtgctgtgtctctccctgagggctgcgtgcagcctccccttccagaccccgcacggtatttcctcatccaggaagacaggacctagggctggacggcagctacactcatgtcatgcgctgggagggtctcccggggtctccccaggaccacggccacctaccacccctgtcccctgaagataaatgatcgcagctgcaaatttcaaacagtgtgacgtgctgcggtcggcagccaagacaaaaaacccacagacgtttggcctttgaggcagaggaacaccacgagctttctgttgcttttcttttgatctgctgtttgattttaaaaaggggaaaaaaaaaatggagaggatcagtgagtagaaatctaatttgaaaaaaaaacaaaacaagttcacaaaaacaggaaatgtcgtctaccgtggaccagtcgctgctgctttgggacttttaaaatgacagcacgtcttatagacgccgttcacctctcctagtgagcctggaattctggggctcagaggagcaaggttgagaggtcgtggatgtaggaagggcggagaaaccatctcatgtgccccgcagcgtttgctccagggccggggctggtcctcggctaagctggcttccttggtttttctaaaggaagactcatgacttccctgagaaatgtttgcttacaaaagactgaaacccaccctgtggtgctgaaaccaaggggaatttaatgcaagagcaaaccctaaagccagaagctgggtttgggcctggccccatccccatccccatctcatcaggcatcacagatttaaggagtagggctgtgggtccctggtgctctctgagcccttaagtctctggtggggcttatctctgtgtctctctttctctcccacacagatacagacacacacagccacacacacaccagagctacctcagaatggtgccttcagcatagagcctttaatcccacatgggtccagggccccactggctcactgtctctgaccgtctgtgccacctttatgggaaagagagtcagatcggttcatgtatctctgtgcctcagcttcctcttctgcaaaataggaatgctaatggtatttctatcccggaatgtctgtgaaggtgccatgggttagacagtgtgctcaactcattcaaactcaggcaagtgtacccctgcgcctgatagagaatgagtgctcaaaatggggtgtgactactgtccttcctattgtacagcgtccctggtataaggagttacgtgaacaaacgttttcagagccacctcaaagagaacacaaccagcatagaaaaaaaaatagatcgtttcactgaaagaaccactataaatactccatgataagtcagatttctggaagatattgtataattttcaaagcactgccacatacatggctcaggcgattcccccaatattctgagatattactgagactaataaacaaggaaataagaagttaaggtattgcctgaggttgcactgtctgcaagtgatggagtttaaactcagatccacgtcccacctctaaattctctgtgggtttgttgttgtttgcctgtttggttttggggggtttttttgagacagggtcttgctctgtcacccaagctggcgtgcagtgatgcagtcatagctcactgcagcctggacctcccaggctcaaaccatccgctcccctcagtccctggagtagctgggactactggcgcatactaccacactcagctaagtgtgtgtgtgtgtgtgtgtgtgtgtgtgtgtgtatgagattttaccattgttgcctgggctggtcttgaattcctgggctaagccatctgcccgccttagcctcccaaagtgctggaattacagatgcgagccactgtgcctggccaatttggtgtgtttttaacttcatcagaggtaaaagttttcataatccatcatatttctctttataccttggctactgggaagcacaaactaagtgtgatgcccaaactcagcactgccctaaccgtggtttttagtatattttgtatattgactgaactgcagtacttagatgaggtagattggttttctgaaacacagtgtaagtgcctctgtaaagtggatgaattgtgcctttgcagacgttcaaaaatggtgaggatgagttttatttctaacacgtcatcgtttctgcttgtggaagaggacgggctatggtggacgtagcctggcacctgttccttcctgtgatctggttctctcttccagccttgctgtctggagtcgttgctggaaagagtgtccaaagaaaacaaggccccatccccctgcaggtcatctttctgtttcctgctgatacctggggggaggtgaggggagactttctcaaaggccctggcagtgaaacatcatcaaagtgagccaagacctttgtgaggctgagatggggatcacacctttccagaacgctcataagtgtcacttcctaaggatttcaaacctgcacagacaaacccacgtgtcctacgggaaggctgctctgtgtctaggggaaggctaatgactttcttggcctttgtccctcagttctcaggggggtggtgctggcgtgccctgtcagacccacttaccccagacaggagcctgacatgcctggctgagtcctgcctcaggactgaggccctgtggctcagttttttgatctgtggtgtgagcgtagtatcacctcccctgggagtcatgatagcagtcagcagtattaacaacaatgacaacaacggcagctgggcccctcaaggactgtatttaatactcacgatatccctaatacagctgtgagccctttgttttaactcattcctgtcttaaaatcgctgatgagaaaacagagaggctgccgacttgcccgggatcacacagcaagtacacacacaacatagtcaggacagcctggcgggcggggtgggcgtctggggggccgtgggtctgccccaggcctctgcctgcaccacccctaaccctgaaggcttgttcaatctgtggcctgcagtgaagtgagaatttgcgctcccctttcccgacactcactccgataaatcactccctgttttagttttattgttagagcgagaatgaaacctccatggagtgccccatatatctgcctctggcttctttatagggtctttggcatagagagacatgcccctgggaggtggtaagagttgggttagccaagaggtggtgcccaaattagactctggggtgaggggctgccttgctcaccctggccaggtacccctaattactgtgaccctaagtggccctccctggaaaggggctctgtcgtatcactttagtgcccagaagaccgagcgattggactgggtgttttctgacctcttctcagagaaaaacagttcctatataaaacgaattctgttcagtgtttagaaaggaatgaaattttgacacaagctatgtggatgagccttgagggttcatactggggaagtaggagaaagacatttcacagacatggtggtaagtgtatatgtatataattgaacatataaggcattacaggcaattatgtaaatttgagttgaaggagagctattagaggtttatagggagagtgtgatatgatctgacattttaaaataatcactttagctgctctgttgaaaatagattatagggaaaagagcagtagtgtggtgaatagttaaagggctactgaagtagtcctaaacagagaaaatagtggccttcaagtggtgagaagggcattatgttaactgaaagaagccagacacagaaggacaaatactttaccatgtatctgacggcacccggagtagtcaggatgcctcaggaggatggctaccaggggcttgggggaggggaatggggagttcatgtttgatgggtacagagaatccatagggaaaatgaaaaggttctggagatcgggggttggtgatggttgcacagccatggcaatgtgctgaatgccactgaactggaaggagaagatggtacattttgtgttgtgtatatttcaccaccatttttttttaaaggggagacttctgggtggttttctgcccatgtcgctacctagggagctcttgccatgtggaagcatttgttcacacagggttaggagcagcagccagggtcccgggaggcaaagaaacttgtcctcaggcctcccctctgcacctctgaggctcaccgtgggctttctgggccgctccttgcccagaacagttgctggaggactcccttagtctttccctccaccggtggagctgccgcagttgccttacagagcatttgagatcggctgtggtcaaataatacacacgttagagtaagatggactgttaaatacaagaacacccagttaatattgaatttcagatagacaatgaataattttatagtatatgtatatcccatgtgatatagggacatactcatactaaaatgatctgcaactcccatttaactagtgttctgtattttctttgctaaatctgacaagcctgtgtgagaggcaacccaggagtggaattctccccagtgtgtcttggtgctttagggctggaagtgggtggtagagtgtcagccttgcgagccccagttctggtatggactcttctaagcccagcgcccccattttgtagccacttatctttgagcacgttcccagctttctgactctcaatttccttatctgcacatgtggataataatggttccctcctcatgcaatggcagaggatgaaatgacagtagctgtgctgtcgttagcatagcaagcgttgtgttcgtgtcaacacttcaggttgtttctgtttctttgccttcctttatgaattaaagatgaccattttctagatgagcctgaggccgtggtgccgaaacaagaaaacagcagtgaagacctggttcttcagcccagcctggtcgtatgggttcatgacctcgagtgagtcagttcacctctctgggtctcagttttcccagctctaaattcaattacacagttctcaggttcctttcaaattcaaaagtgtacatgatacctcaataaagctgttaatttttttttttttttttaattctgagcctgcctcccctgtgtctcctccccgccgtggttgttttctcacctaatacttgcaatcgtgggaagtgggtgtcacttctccacttaaataagtctcaggactcagaaaagttctaagcccctaactcaggggcacataggtcttgtgtgctggagcctagctttcaaccctggacttcctataggccaattcttatcaccctttacacaccagggattggttttcttggagagtgggcagtgggtctcacagccccaggtcaacccacacaggacggatggtccgtgggcaggttcatcactcaccagactcaagcaggacaaggtagggcagtcaccatggctcccaagggccagtaggagcagtgtatggatgatcttttcagctgctttgcctctgccatcttgattaatcaagatgtggccagaccacacggagctcttcagtcttgacatcatcaatccctttgtgtccatctcttgagccaatgaagcaggattggcaagaacaaggcctatggtgaataggcctgagccaagcctctgttgacagaggtcagagaagacaacagagagatagcagaaagaaatattgcatatttcataaggagttctaagtgtctcatctagaatccttagtgaaatatgtaatcagagactctttaattctttgctttaggcctagcttcaaagttcaatggtaatttttgtccttttcattttctgacagaccttgtcaaaattgggtggtcttgtaggccagtgaagtccatatttgtacatcccctggtgcagagtccacgcttgaagcagacactggatctgccgttgagcatattcaaagagaaaaacaaagcagctgaattaaaatgaaaaactaaggggcttgtaattaaaaggctgtggtgtaaaccagaggcctggaattggtacctggtaccgcaaactaaaaatagactctttccacagaacaagcagggaaatcccagtgatcatggaccactgggaggtggacagaggaggcaacatgcatcttcctcccctcctctcccccaagacagagaagctcaacaaccctgcttcaggatggggttttctggaaagggccaggctggtctataggtgtaatgggctgggaaagggtgtgccaggatttgagcggcatcaaaacctgctgtagggctgagacattagagtgtaattcctcaaaaatatccccgacatacacattttaactgggcttagatgtggttgtatatgtgattagattacactgcctaaggaacccatagcaagatctgatatatctgaacaatctcatctatcttacagaattcagggccctgaaaggtaggatgtagggcagataaatattggtggatagagtaaggaggctattagggacatgcctgggactggtcactatcatgacaaaggatgattatgcccacctggcatttttgtctggtccaccaagctgccttagttcaccagtgtaattgtggataagtgggtctctagggatccaaaaggaaacagacatttatttggccatccacccccaccccaaatgatggtgcactcatggcaatggcaaattacattattagaaccttctagaagggaatggttctaataatgtaatttgccaattcctggaagtccctaaggtcttgattggttaaattttgtgttgcacccctcaggggcctacattcaagatccttcagggccaaaccttgctcccagctcatcctattcagcccttggaggagcaataaatgtgttaatctagccaagaatatacagcaaggccagggaagttggccatctgctcaggtgctgaagttacaccaatgcaaacagaaatttactcctcaaatcccagcacagactgtggctatggggccagcaggaaggctgatgggagtgggcaggccccaggtagcaggggtctggggaggcacattcaccacaccttggagcagtgttttgggtattggtagagtggagatgataagactggaccaaccagtccaccacccagcacatggtaggtgttcctacatgtttactgaatgaatgagttaatcaactgattttataatcgagtatagacagcagtctacactcagagcccaagtagaaaatgcttcattctccaatccctttcagtcattcaacaggtgtttattaaggcagtgttctaggtgctggagacacagccatgaaaatggcaaacgagctccttgagcataggaagcttatggactagtgggaggataaggagacggttagagaactgagaacagggaccctaagctactcaggaaagtccctccaaggaaatgatatcttagccaagcctggcaagcaagttaaaaatcaggcaggcacaggggagagagacgtggatccaggcgtggatccaggcacagctgtgccttccggcatgtctggggataaaatccagtgttgaaagagttgatgccctctggacatagcatgatgttaaaaacaatgtcagcaataatagtaataataataatagctgcaatttctcattctctacatcaggagagtcttcacttctttccctttcatgggctgcggctttaattgggtaagtggttcctttagaaacaattagggattgtaatcagtcgccattcagaagtcttcagcaggaactgattggcaggtctcttccggcttgaccttaaaacttccccatagctgtgactaatgtaaagcaaagcccggaggagcatgatggatttcagaagaaaggaaacagaaatttggatgcgcccacagtctgtgcacacacttagcacccagcattttgtgttctatggagaaacatctgaaatgatcagaccatcttcaactccaaactcttccttaaaaaaaaacaaaaactgagttgttctctttaaaaagcaaggggttggaggaggaatttcagacaggagccacccatctgtctgaggttaggatgaatttcagagttcccaactgtgttttacaggtgccctgtggaaggtgccagctcctgtacttcattggccatgatgtgctcttgtcccactggtttgactcaagaaaacactggggacccttgaagtcctgaactgagggccttgatcctcctgaagtcccaaccctacccgggaaggcttgctcccaccctaccctgctgggcctctgccctcctgggtcccaccagctcttagactccttggagggcagaggggagaggataaaaagaagccactgagaaaggcagacatgagtgtggagatggacagaaaggggaagctccaaggtagatggccagtatctttcttccagaatcaagagccagttagagcaatgtcgtgctggttaattgtcagatggaaaaatgtgacttacaaaacagtataataccaattaaaacataccccaaaaagctgggaaaacatcaaaacagggataataattacctctggttaatgggaatttaggggaattttattttcgtgttattgttttcctctaattattaccattagtttctgcagttgttttaaggataacagcaagcaggaaacaaaagagacagaaaaaacacagaggccaagatgagctgacagaagcagacacatggccagaatgaccaacagactaggggagactgacctcctgccccacatactctgtccccttgagcaagcctctctgtgacctacagcttcctcccctgtgaaatcgtgcttcctgtcctgaccatcttatcagttgtcctgatgctcaagtgagaagacaggggacttggcaaattgtgtagaggatgattgtgagccagtcattaagtactgaggattcaagcagtgtttctctgcagacagttcacccaaatgatttgtgaagaatgcagattcctgtgcccagattgggtttctgggagcagggcccaggaatctgcattttaacaagcccctgccctctgactttgagatccaggcatttcagacagacagtatcagggcaggaacatggaaggatggctgtcataggtgccatgagtgacagaagcagcgtaaggtctagcgtattgtcttctcgcaacttgaaccttgctggagaagtgagaagtgggtgtgcagaatcgtacggtgtgcagacggtggcctggtgaagtgccgtgtacctaggagttgagggggagctcgatggcgctggggcagaggtctgcggagagtaggttgggtttagaaaaatgaagaggaggagcagcacaggccatctggatgggggagcccctggtgagcaaggtccaccaggtgggagggcaaggcctcctcctctggccgtgcgtgtctggctgctggttggtgtcggggtggttttgcactttctgtttcctgatctcacctgtcccaggacttggggctctaagtagcattacactggctgggcaggtagtcaccctcatcctctgacctgtcagactggctggtgtcagctgacagcggagctacactgaaaacagagacagtactggggcctccgtctagggccttgtactcactggtttgcttccagtcgactctgaaagctccctgctgcttcctccaccattccttcactcgttctggaggaactacccgacctgggttggcatcctgcctctgccactcatttactgtgtgacctgagagcagttaattaacctctctgttcacacggcctcttgtatgacatgggagaagagtgactcttgccacagagggttgtcataaggattgtccctgagataatccacacaaaacctttgatgcagggcctgacatttagcaagggcacaataaatgttagccactgatacaggtgttcacctggcaactgtttactgaactcctgccatgctaggtgtgagggaggggctagaggcaccaagagctcatgatgggcccggatgggtatgaaatagcctcctgtgacacagtatgatgaaatggtgtgtctcggatgcaggtggcacaaagtgtggcgtggctggcccagcgacgggcccagaggaggagacacttggttggatcttgaaaggacagaatgggaaggcgagaggacattccaggtggagggaatggcatatgaaaagtcccagtccaggatataacatcctcactcctttatcctctgctttgggaagaaatggggagaggagtggcttctgctcgtccacactgttcatctctaggagtggccaggttgaatccaaggccaacttggagtggacggaaggtgcagcagtttcccagaagggctctacaaggctcctgggttgcagctgccagaaaagtctgttccccacagctccctggtcccagctgtgaggtagttaactgcagctgcctcaatgtcaaagccagggagaggatgcccatcttaccttctgccctggactgctgcagctgtcctgcatcctgaacatttgctgtccgtgctccacttacgagctgtcttcctcaggccagtcctggctgccagctccatttcatcttgtttatctgtgtgccttgacattggctgtctcctgcatccttccaagccagagaacccaaattgaccagaaccctcatcggagggctaacttactgtacacgacatggcttagaggcatggagggtgaatgtatctatcacccagacacggctgcccccgccctggaaaacaagggcagcccgaacagggacactcccaccagcaaactaaacaggcagttcaatccgtaagcaaaccaaagccgaaagaagtacaccaaagagatgtcatcctcctccagcctgtgcagcgaggtggctgtctatgctgctgagacctaagagagtaagtcctgcttgggctggaagtatgaaaacagacctgaaaggcttctcccggttttattttggggggatcagaaggagaagaggggagaacctggtatccctgttctgaaaatgggctcgagggctgtggctctaaggccacattttgtaataggagagtaagcaaactgggtgtaaacccccgcacccctgagactcgggaccacggactcagcctctgcgggcctcagcgtttccatctgtaaattggagctgagcatgtccacctctcagggttgaaaggattcggggtataatgtgtccagtttccagcaccaagtaaaggtttcctatttttagttcccttccttccctggcataatgtccatccgtgtcatgattccaaaatgtagttttgcaccaacgcaactgcggcctccttcaaggtgcatttgtttactaaatactgtttaatccccaacgtactgggcattgggaatagagctgtgaatgagacagatgagcctgccccaggggctggcagcccagcagattggcctttggtggcattttgggggaatcagcagtgatggcagaaagtccaccccaacatcctcccctctgtcctagggcaggagaaactgcaaccagctccacagctatgctcggtccctccagggaagaggattgcgctgctggtggtcagttttatttgggtacacctcagcatcagtggctcagaagcaggaggtggcaggttatggccatgccctgtggtggctgggccccctggggttcgtgagctttgctggcatggacctggctgtgccaggagcctgtccttctgttcgcctatgtgccataagccagaccccagcaaggcttctcccaaagacgtgggtgcctcagaaagatgaaagcagtgatccctatttccctaagggcctccccagcctttgacagggtcctggcagaaaagctagactcagtggctggttttcgtaagttttgaccccagggacatttatagatggcctgaaaactaaatcaatggattttacttactttttaaaaattcacctttcatcacattagaaatagaccttcttgccctatctctgagtctcctcacgtctcttctcccttccccaacccaccctctaagggtctaagggtgaagtaacaggcgggagtgcctgtcatgcacagcactaggtaataaaacaccttttggggcttagccaccaaatgtccctcctgtccaagtgtccatatccaaacctgagctcagtcaggtatccgattggtgttgctgtcaccggggcatttgccacacccaggtgctcacatcatctattgatacccccagtctccagattctttttggcatcctcctccccagcttcctaatcactgatgagaccagatggcaaaacaaatggggactgattttgcagtgacatcggaattggaagctttctttctggaactaagtattaagtattttttttaagcacttatttccttacatgtagttcacaaagagggcgtcagccctgtgctttgaacttgacatgcatcgtctcacttaatctttgctccacacccttgtgtagtaggtatgaccagccctatgagagatggggaaactgaggcccagaccagtgaggtgatgtgtgcaaggtcacgcactgggattccacccatgcaccttgtctccagggtgtgtcctcttcccacaatgctgttctgccaccgggttctttaactggaagatgatgtagataagacatatcttgaatgtagctgtggagggcatgaggccagactgtttttgctagatgcaaaatctggagtctagctttccagatcccacagggaaaagacctcagagtagatccaagatttccccatggcatggaagaaagaggaaaggggacatttataaggcctttgtgggaggcagtaacactgactgtgggtatcaggaaagggccttgcctgattctgggggcacctttaaacccagcaagttcccccgtgttcaaccctccctcccagggctgcatgatggaacccttgaaccaggatcagttgttgggagtcgcagccaacactttgacacacactgtgtttcaggcagtcttctgaatgctttgcatattctgtgaggttggtacttccattaggtgggtgcaaaagtaattgtagttcttgtcatcaaaagtaatggtaaaactgcaattacttttgcgccaacctaatactatccctaccttatagataaggaagttaaggcacagagaggtgaagtaacttgcctaagatcacacatcattaagtaggtggcagaaccagattcaacccagggagattggttggctgcactgatcttatctatactgcctctgaggaggggaaccctgcttttgacgttgtaaggtaggaggagttgggtgatgggtctggtttctttgaaaagccagcggggggcgctttgagccttctgatgatgccatgatggctgccatgcccccatggcccagccctggcaaaagtgtgtgcctgtgggggctgcccaggaatgtgggcttatgcctcctccccgccaccaccagcaatctctgtagcttttggctgggcactgctcctccaaagaaggcagcagggcttcccctgccaggagggccagcttccgccagcagagctgcttattgagaggtacctggtcagcactggcgccagaggggcacagggaggtgtttgctcaggcccagcccatgcttctctgcagaagtggacgtgcttttctgtttatttttcttatttaaaaattttaaatccaactatcttgaaatagttggaggtacagagctgcttgaggaaaattcagccccaaaattcatcagaaagatggttggcctcaggatcacaggggcacgatccctcctgaaggaccagcagttccgggccctgtgtaggcacaagatgaatgtcattcatttaaatctcaccccgggcccgttgtatagttgcagaaactggggctcagagaggtcagcttgcccaaggctgtgctgctaacaagggcagggctggaccttaagatccggacccaaatgcctgctgtttctcccgcccctagttctgaatacggtcacaggtggaaaacggggtggcctgtgatattccagtcccatgtttcttactttgccatggggaggaatgaggacctggggttattgccctgtagttcattccacccttcaccccatgggatacccagtcagccaccaacagcctttcctggtaggcactcagggaagtgccccagggtgaggaggatttgtgagaactggcgctctgcctcctgggagctttatggcaaagtaacagcaagagaacacagacaaaagacagataatatggagatccagaggaggagggtttgggatgcttagacaagggtggggcctgcgtttatctgataaataacacagtgattctgtatcatcatcgtgttgtttacgtgaaccctgccaggcaccacatgccctcatcagggcaaactgcaaaattgccaggtttgcttctgttctgcaaacattttttgagctcctgctctgggggcaggcatggtgctcaacacaggggattccaggatgagcaaggcaacagtcctgaacttcagggagcagaggtagggatctatgggtaaacagacagttacagtatgttgtgagaagagagtaagctccagagtccagttacctgggttcaaatcctggctgcaccaccggctagctttgtgacttaaatgaccacctctctgggtttcagttgcctcatctataaaatggaaatataatacgtctctaccttgtaggagtgatagaaggactaaatgtgattacacaagagcttaggacgatgcttggcacctggcactcaaaatatattagctcttctggtggtgctggtggctgtgctgtgaatgataacagcaataatggtaaaaataataataccacgttctataagagagatgagcctagatcactggcggagcaccaggaaaaggggatacctgactgatccaagcctggtggtggggctgggtcatccgagacatcatcttagaggaagtgaggaatatggtgaggtctgaaagccccacagttagcgggaagaagagagtgagcaaatccagagagacttgggggcaggggacttgctcctgggcaggtcccttaggtgcaagaaagcgcagtacttctagagaaatcacaggggtccagtgccctgcatgggacagggctgctgagagacagagcctgaggggctggcaggggccaggatgcagatgctgggtgccaggctcaggcatctgcgctttccatggaaggcagtggggactcgtcatgggtttaaagcacaaggacagcagagttagagctgtgatcagagcctctgttttggtctggaggggacccaggcttggagcccagaaactaggggattgtcagcagcagtcgaggctcaaggggatgtggtttgtaccagggttgccaggatgcggggttgtggccaggctgtggggagtgggtgcctaggtacctggcagggaacctgggcagacagcagtgccattccctgagatgggacacaggaagagggcagtgaccactctcagacattccaagttggaggttcctgtgggacattccatgggcaatgtccaacgggaaggtgagagcatgcttctcgcctctggtataaatcctcccttccccaaagttccccctgcaagataccatccctgtgcctacagaatctggggaaagaacattccatggagaaggaacaggacattcactgccctgcgtgtggcatgttcagtggaaggaaaggaaaggaagaagagagagagaagagaagagagaaggaaggttggggagggccattttgtagagggtgatgataagaaaaagaccagtgactcacaagctcatacagagaatgcccagcctggccgagctggagatttacccagaggcatccagcagagtcccatgtatttccagatgtttctggttagaagttcgtataactttcagagaaaatgccctgccctcctggattctggcccagtttgaagagcaccccaggctgactgagcgtagcaaagcctcagagaggcagtggtgggctgttgggctgggacccactgcacgtacaactcgggaagcccacctggccctctgtgagtctggcctgtgaactctgatttacccggagttggcagggttgggggtcttagagtagccctttgagaagctggttcagttctgaactccatccaggtgtccatgaaagagactgcttcgagtccctttcagtcccccacacagcgctgtaggtgtactagaagtcatgtataaactgccctgaaaatctgatttttgaaagcataggagaaatgcatccttctgctgcataaagcatcttcattgtgagtcttgatagaaaccaagtgtggcttcagggcttaagaaggccaaacctcaccctgtgacttacacaactgagaccaggagtatctatgagaataaaatgtgactttcctttaacaccatttatagatgatctttatgggatattctgcctcagcaattagctatgggaattttaaaactccataacaactttaaggaaaggaagttaatcagaacttcccgactaagaactgagttcaataatcattgcccaaggggcttccctgtacccagaagccacgtagatctgggctgtggatcagcctgcaggctccttgccatcccccgtgggaatgactgaggtcacacgggaggtcatcgtgggggtggctgacttgggggccaaagacatgtacttcagaacaggacagccagggtggaacctgggcctcaccacttgcaaggcctgagccttgggacatgaattcaagccctctgagcctcagttgactcatttgtaagttggggatatcactttggggattattgtgaggattaactgagatggtgactgtcaagtacttcgtgggatgcctgacgcatcacagagccctgcaggtgagtttgtagttttcccttgtctggccaccttggggtcatagattagttagtgaatgatcagttgatctagagccttctagatctttctgcttcattccagatctcgcattgacccttttgcccagtgccttcctcggggcagtggaggaagacacagagtggaggtatttctgactcctcttgagcgcctgtggttttgatgtttttcaaaagaaaagaacatttcagaaatagaggagggagaatcccccaccaggcagttttgcagggagggcctggcctgagaatgtgctgggcatggggaggtgaaagatgagccaggcggaaagggagggcgaggctgtcccctgggaaggctgggtggcctgtccccagctgtcactggatgcctttgttccctggagccaagaggcctcccttggaggcatcagttgccacaggaagcagattcattcatgaaaacccaccccccaggccccgatcctacttgcttttttgaacctttctgttctttgctttggctcagagaatgccacttagtgtataaaaaaggatcccaacgtcccgccctgctggaccggtgtaattatgtctgctacacttcctttctggaaggccctggtcagggggtgctgcagccttcccagaccccgcgggctcatccttcttcagcagaccggcctgccctgtcattttgggcataaagcctgtgcagggacagccatggagcccttccccttcccgaccagctttgaggttcgcagaggtgccccgctctctgtcgcctcaaggctgcactccctgttcccccacccaatcctctcttagatggccttcggcgccagctcactcctcctctgtgggctttgcatgaatacttctttcttgggaaaatcattccctgctctcccaagctggaacggcactcctgtgccatgcgtccatggcacctgtgcttaataaaagcagtgaacatgaactaaacacacacccaggcaagggcctggtctggccttcctgacttcatcctcacacccgccccatgatgcaatgaggcgtttcctgagcacttacctgcaggggcacgtgcaactccctcctctcatctgagctttacagccacctttaaagcagggagtactgtttggctcattttacagtgaggaaatagaggctttaggagaaagcccggacctcatagctagtaggtgctagatctgggaatctgacactagtgtcttctcttggccactaaattacactccagctgccacactgcattgccatcttttctgttccttgtccctgttagaatgtgtgctttctccctgaaatcatatcttgcttcaaactgggctcccccagcgcctcaggctgtggcctgtttgcataactggcagtcactggactgattcaggccaaggatggagctgccaccaggttgcagggtccctcctgaagacggaggaccaggctgggaggtagacagcctgctgggcaggggtgaggggtgagctgaccagtctgaagctcatccagggcaaagcgggacctgcaggtggcagacgctgtcagtgggaggttgggaaccaacgccggtgtgtgccagaggagcccgggtagtgggtgcgggcaagagcaggcctgagcgttctctccctctccacctggaacaccctgaactcatcactttttgggcttcaaccaggggaggcagggaaagtgaaaggaaaagtgacatcagccactctccctccttgtcagcagcttagggcaaaattctagttgggaaaggtgtcctcatcttttcattactacattggcctgaatttctagaaggtagagtgacttctctcggccagtgtattcatccgtgcaccaggcatacagtcagctattctcaccatcatctataaccacaggaggtccgtggcaccgtcatccccattttacagatgagaatgctgagtctcagattaagtaacttgcccaaggtccacagccagtaagtactagagccggattttaagcccaggctgtctggctgcagagcctgtgttctgaaccactctgctctgctgccccttgatggaaacagccacatagtaaagaactctatttttttcatgagaaaaaacttttaactgtgaatattaattgcttgtcccttaagagcagctgtgggtcaagtgacacagtaagttctttgcagacttcatccctttaaacctcataagagccagtgaggtttgtgctctctcagctcccactttactgatgaggagactgaggccaggagagtgaatcttactgaccccagatcatggggctggtcagggccattgccaaattttacatccagattggtctgcctgactccagagtctgatctccagcctgtgctgatgagcttgctcatctccgcagagttccagacatcctagggagagtaaacctttgttccatcaaagcaaatactctccatttttgttcagtatttattgaatgagatcagggagacactgattttctgtaaaaattgtatcctgaaatcaatgtatttagtttctaccacttagttttagtagggtcactggcctttaaagaaaaaaatgcaaagacttttcccagttcttgcctcacttttctttaatgagctctgaaatcaggccagcccagggggacctatcccacgttccctattctggataataaaatgggtcactcacttctttttagttttataatttccattgatcataaatctacatgtgttgtcaaaatactcctctgaggttgatggaaggtagcaaagatggtttttctatttcataggaatgttatggcaccacacagatgacactccctgccctctcactctgccctggaatccatccctgcacctccaacaagggctgctgggtggatagaaggagaaaatccctctttttgctctgctgtccagcagcacaacaaaaaggcatatttgggttccagtctttgctctgctgctttctgggagtgggtggatgagctctcatctctgggcctcagttttgccatctgaaaatcagagggtggtatcagataatcacaaaggtattttgtaactctgaagttctgggttctaaggactctgagatgcaaaattatttgaaagctctacaggcagaagaatattaatacctctgatgtcatgcaattgagggtgtcttattcacctctgggccccgggtctgtgtccctgccattgtgtgtgactctgttcctggatatctgtatcttcatgtcctcggccatggcctaagaagccgcagagatgtctgacttcctcagtgaacagcagatggatggatttagacgtgcttgtccctctagcactccacgatggtcttcctgttccactttcactatgattgagaatgggccgtccttcttgaaagaggaaaaaggcagtgaagtgataaacaaaatcttcttagtactctgcaaagatgttcatgtgttgccacaaagctaatcacccttttctgaattctgcaagtattgggcaccaagtgcctgggacactgagatacctgggccttatcccagctgccctggagggagggcatgagttgagctcacattgttcatagtgacattaactatgatcaggatggagcaggttgaggcaaaggggtgaaggtaaaggtggtggaaatggctccgttggggccccaggcttggtggtggtggttactggggagagaacgagggtgtcttccaggcaggggtaggaggagggctttggagccccatctgcagaactagctccacctctctcttgggggaggaccagccttcctctcactggaagcatgcaacatgcagaaacgaaaggcccagagcatggctcatgcgtgcctttggaacaatggagaaatcgggtattgttaaaacatgctgcttgactaagaaataaatggacctctttgggtgcctctcaattcatagttcagttactgtgaaattccatgaatcctttacagtctgttaatacatattaatagctaatcttgatattgccagaaaattgctcttcagacctccaatttgcttaacagctgccaatctaagttgccgccaattgcctctatcggtcttctgtgtcagtgagatattaagtcgccatgagccaggcattttgcacagatgacaaatgtgtttggcgttcactgcagaacccgctcatgtaaaagcgacgctcaatcatcagttctcaaagtgaaacagagaccaccagcctcagaattggcctgatagaatcatcacggggcagcgatcaagagcaggttcccaggacagcccgacccactgaaccagaattactcagggtggtgtctgggaacccgcattgcatcagattcccgctgtgattcttacatacactgaacattgagaaatgctgtcaggtgaaaggcaaagcaacattcctgctatcctgcccccggcacttgggaaaccaccctctgtaaggtttacagtagctacttcctgagtgcctactatgtgccaggtaccatgctatgtgctttccttgtgggctctcatctaatcctcaaaatgaccctgagaagtagactttattgttgtccccattttgcagatgaggaaactaaggcctgaagggctcaagtgattaggccaaaatagaagtagaatattctggtcagtctgggaagagaaccaatgaagccaactggttcaaagaagggagaggccaggaggagatcctgaagggaggcaagcccctgcctcccaagagcatcaccctctgggaggcccatcgtggtaggggaggttgacggcctccctggctaggggaggggtaagccacccgggactgctcagtggacccatgctcctcctcccctactcctgccagcagcgacttccgaggaccccaaagcactagccagcaggtgctcagcctgcctgcccttacttctgatttcccaagcagtgtgggagctgcatcccttcctcaccgttgttcctgttccgggccaccattcatcggaaagcaggccagcttggcagcagccccattcctattcctgcccccctccggcaccctgcccaggcctccggaagcccaaacagctgatctgagatgtcaataaggcccttccagctgcacctggcctggctgaaagggagccccgggggtaccacacagcctcagaccaagtccttcctgggcagcccttggcgccctccccctccagcgtgatttgattcccctcctcttgtttcttggcctcaccagacgggtggaaagtgccagcgtccctccctcatcaaaagctgttgcatttctacccagggctgagagtccccgctcttctctcttggcctccagccccagagctgatgctaagctcctgtgtggcagccacaggctctaagccagaaatctccaccagaagatgaggtgggggctgcgggtttaggcacaggaagcccacgaggcctcattggccgtcttgtgacccgaacaatccctgctgtcccaaagtcattcatgcattcaacaaagctttcagtgtccaccgtatgtgaagcactgggaatacaacagtgaacaaaaattagtgaaaactacctgccatctcagagttaacgttcaagaagggagagaccagcaaaataagtaaattgagataaactaaggagataagtactacaaagaaaagggaagcagggaaggggatgggagagctgaggttccagaggtgtctcttaatatccaccactgagtgtgagccttcctaactgcacccagggactcccacagtctggctggttccgccttgtctttctcttgcagttgcccacaggttccactaagtgagcaggggcagctgggctggaggcagtgggggctgagagcagccagaggaaggcacccccttactatcctcaaacacctgggggaggcaccaaccctacagggatggttcggctcacaccactaaaatgattgtagctaacatttaagaatacagagatatcacatgaaacctaatattctgacttctctttttttaatttatatttttctaacttttaagttcaggggcacatatgcaggtttgttacataggtgaacttgggtcatgggggtctgttgtacagattctttcatcacccaagtattaaacccagtacccattagttgtttttcctgatcttctccctcctcccaccttccaccctccaaaaggccccactgagtgttcccctctgtgtccatgtgttctcatcatttagctcccacttataagtgagaacatgtggcatttggttttctgttctgcattcgtttgctaaggattatggcctccagctccatccatgtcccagcagaggacatgatctctctttttttatggctgcatagtactccatggtatatatgtaccacattttctttatccagactattattgggcatttaggttgattccatgtctttgctattgtaaacagtgctgcagtgaacacatgtgtgcatgtgtctttataatagaatgatttatattcctttgggtatatacccagtaatgggattgctgagtcaaatggtatttctgtctttaggtctttgaggaattgacacactgtcttccacaatggttgaactaatttacactcccaccaacagtgtataagtgttcctttttctccgcaaccttgccagcatctgttattttgactttttagtaatagccattctgactggtgtgagatggtatctcattgtgggtttgatttgcatttctctaatgatcagtgatgcggaacttttttttgtatgattgttggcctcatgtatgtcttcttttgaaaactgtctgttcacatcctctgcccacttttttatggggttgtttttttcttgtaaatttgtttaagttccttatagatgctggatattagacctttgtcggatgcatagttcgtaaaaatttcctcccgttctgttattggttgtctgtttactctgttgatagtttcttttgctgtgcagaagccctttagttacattagatcccacttgtcagtttttgcttttgttgcaattgctttcggtatcttcatcatgaagtcttttcccgtgtgtatgtcctgagtgggatcgcctaggttgtcttctagggtttttatagttttgggtttcacatacaagtctttaatccatcttgagttaatttatgtctgtggtgtaaggaagggattcagttttaatcttctgcatagggacagccagttatcccagcatcatttatttatttatttatttatttatttatttatttatttattttttgagacagagtcttgctctcttgcccaggctggagtgcaatggcatgatctcggctcactgcaacctccgcctcccaggttcaagcaattctcctgcctcagcctcccaagtagctaggattacaggtgcccaccatcatgcctgggtaatttttgtatttttagtaaagaccgggtttcgccgtgttggccaggctgttctcgaactcctgacctcaagtgatctgcctgcctcagcctcccaaagtgctgggattacaggcataagccaccacgcccggcccctagcaccatttattgaatagggaatcctttcctcattgtttgtttttgtcaggtttgctgaagatcagatagttgtaggtgtgtggtcctatttctgggttctctattctgttccattggtctatgtgtctgtttttgttccagtaccatgccgtttcggttactatagccctgtagaatagcaagtagggtagctgatgcctccagctttgttctttttgcttaggattcccttggctattcgggctcttttttggttccatatgaattatagaatacttttgtctagtactgtgaaaaatgtcagtggtagtttaataggaatagcattgaatatataaattgctttaggcagtagggccattttaatgatattgattcttcctatccatgagcatggaatatttttccatttgtttgtgtcatctctgatttttttgtgcagtggcttatagttctcatcatagagatctttcacctccctggttagctgtatccctaggtattttattctttttgtggccattgtgaatgggagttcattcctgatttggctcttgacttgactattgttggtgtatgagagtgctagtgatttttgtacactgattttgtatcctgagactttgctgaagttgtttatcagcttaagaagcttttgggctcagacaacagggttttctagatgtaggatcatctcatctgcaaacaggggtagtttgacttcctttcttcctactcaaatgtcctttatctccttctcttgcctgatcaccctggccagaaattccaatactatgtttaataggagtggtgagagaggtcatccttgtcttgtgctggttttcaaggggaatgcttccagcttttgcccgtttagtatgatgttggctctgggtttgaattctgacttctcttgagaaattgaaacatctcgaaagaccaggtcctcaattccctaatgacggtatcagtgagatctatgtggcatcagccaccttcagtggcccagtggacgctgactgggttcattcccattcaaggtgccgaggccattcatttctatttcctgatggttctggagagcctttgagtttgtgactctaacccaggtcacccaatataaaccctgcctacaaaagaagtactttaactacactagggtgaaacaaccctttctcattgctcagcaaatcctgggctttcctttctgctcatttttttctgcctataaagatcccaaggttaaaatggagctcagaactatcacccacctgtgccagtgtcagctgaggctggcttgggggctgatccagaggccaacaccaggccctccatcactatcacccagagcctcctacctcaccttcagggctcaaaatgctttccagccacggtgcattttccttcttccttttgccttggaaaggaaggcaaagcttctgcagagattcagttgttgttccttgcagtcaaacaggtgcttccctagtgacaagttacaatccagagaaaccaatttccctgacaacgttaatgtcagttaacatgaagccacttctttcctaaaccctttacgttttgtaccaggtccagaccagatcgtttctttaaaggcccaatatttttctcctttcttttctaaacctaagaggttttgagcattatgtaattcttagtgcttcccctaaaatgcacccaaagatgtctgagacctgtgaccttctagacctttgacccctggctctactgaatgaaaagtcccctatcttaaacctgaggaccaggaaggtgaaactggcccaagatcatatgccggtcaccactccagtccagttctttgctttagcttatagctcctggcattggagcccctgaaatagtggagtcccacccgggcagcctcagatttccaggagcaattaaatataacagatctctggggtgggactcagtcctcagtgtttaaagctctcctatgatcccagtgagctgctagggttgagacccacgcctccagcggctgcccgggagccgataactcccgggtgggtctccagaccccaggaggctgcaccatgcagggtctcagaccacagtctgcctggactcgaaccccagacccggttcctagctccctgagcttgagcaagttaattattctccctgtgcctgtttccttatccacaagttgaaaatactaatgatacctacctcatagagtgtgaagatcaacagtagctggtacatagtaagtgctcaatatatggtagctagtataaatatgtgaccctttttttgctgtggatgtggtgtcttcggtgattcctcatgactagcccttttcatgagagtttagtaattcctctgccagaaagaaacgtcatataatcagagcaaatcagctcatcaggtgctcctccccctcccccaattctgaaacagaaagatgatggcagcacaactgacatgctgagaggggttttgcattcagatttttaagtggagaaactgaggctagacccaagctaacagttgttaaaggcagattcagaaaaccctcagtcacttaatgcttccaaatgtacctgtttctctgggtctatttgcctgcatgtcccccgactctgcccaccccgagacagtcaaagggggcgacctctcttcctcctgtttgggttcttgtgtctgagggaaattgcaaacgctgcagtaatgttttaatttaagggaaaccagctcttccttttaagatgaaacgtagtaaaattttaaagactttttcaaacagtccctaaatttgttacttaaactaattatggttgccttttataaatgtccaaattaaaaatagacatctaaacgagaatgcaggacacagcccagagcccggagccatgttcacggtttcctagaatcagccctcctctgacctaatttatacttttgagagatcaaagcgagatgaagggagttggaggctggggctgggggtggatctaggagtctgtcggcagcagatggcgaacctgggttctgtgttttgtaattaagtatagctgtgaattggtgaaagacattagattacagtcatttccaaatagtataaagctgtggttctcaaagtttggttcctagtccagcggcatcagcatctcctggtgttataggggtcgaattgtgtccctcccaaattcatacgttgaattctcaacacccaggacttccagaggtgactgtatttggagaaaggactgttaaatgggggattgagggaaaatgaggacttttgagtggggccctgatccagtctgactggtgtccttattagaggcagagacacctggagcgcatgcccggtgggggctggaggggggaggggggagattaagaggaagagacacctggggagtggagtcgggggagagatggccgtgtgagaaggcagcaagcaaggcacatctacaggccaaagagagaagcctcagggaacaccagccccacccggcaccttagtctttaaatcccagcctccagaactgtgaaaaaataaatctctgtcgtttaagccacctggtctgtggtatttattatggcggcccaaacactttgggggcttgctagaaatgcaggttctcaggcctgtcagacctgctgagtcagaaattctgggaggagaacccagcaagctgtgttctcacaagccctccaggtaataacgttcatgtaggctcaagtttgagaaccactggcatgaagtatgattagtactcaggggtagccagcccaggagagaatgacgcatggttggagtagggactggtcggctaaatataaactttcttttagtaggctctgcagcctctggaagagtcccaacgggttccttaaatgggatgtggtatgtgtgaaagtgttccatacatgaggaagctttctgttgaccttaggtggaagtgaatcgtggcattattcagtcagctgaagaaagcaaccctccaaataccccaacacaggcaaactgaatccaagaatctccctcctgcactgaattttccgagtcctttgaaatcttgtgcatgttcctctccaaacaactggaatgtttctcttttctgataactagagcaagaagatttaatcatatttccccttttgtccttgctgctaggaagcccacagccaattgagattctaaatcccagccctcatagaatattttttttctatttttatttcatactgcacatatgtcctttgttatggtctcttcaaaaccttttgagaaagcaaacaagaagaggggagagaaagggaatgtaagaagaaagacattgatctcacagctcagataattgtcagatcaacaagtcctttctttgtaaaattgatcaaacttggttggaaaatttgggcattctcttttactatgagggaacgggtttttcttcattaatgagtgagtcttcttcactctcttgtcttcctgatgtccccagagctgttggtcccatcagtagttccggaactgtgctcagggaacgtgttagttgctgaggggttatgacagttacaaaagctcttctgagccctggtggagccaggctgtcatcagaaatctctcctgccccattttgacatggtggcaaagaattcctctcttccgtctggcctgtccagggctgtccttactccaggtttcataaaccaaggttcaagaagtccacagatagaacccccaggagtctagagttccatagaagaactttattgattgagtgtttttattttggtgataatcttttgaaaaatgattatccatttctggatcatcaggtctgccccggataacctagttctgccatatgaagtcgtggtgcctgtgttcattgatgttcttggtggttccgtgtagctccatttttattgtcttgggctaattggaaatgagcagaaaaggaaaatatatacatgatgagcttttaccaagtaaaggtcaaatgagattccagcgtgccgagtttcacagtaactaggaatgaggaagtggtaaggaaaccgagtcctcatgcagcacagaaagggaagctctactccaaacaccctgacccacagcagtgagcaagcatctgcgtggtttcaggcagggctttagttccagtaaaacatcacccctcatgttaatgttgtgcatttgaatgtttatgtttgttttgaacttgtagttgtgtacctggttttatatttctgcacttttttttttttttttttttttttttttgttgagactgagtctcgctctgtcacccaggccggagtgcaatggtgcaatcttggctcactgcaacctctgcctcccgggttcaagtgattttcccctgcctcagcctccccagtagctgggagtacaggtgtctgccaccatgcccggctaatttttgcatttttagtagagacagggtttcaccatgttggccaggctggtctcgaactcctgacctcaggtgatccactcgcctcagcctccctaaatgttgggattacagatgtgagccaccgtgcctggcttgtgcacattttagtaccattttatttttaataatttaaatcaacactagtctgaaaatatttttattttttgagacaaggtgcttactgtcacctgaaattattttaaaattaaaaaattataaaaaccaattaaaatgtatttttaaaaacattaatagtagaggcccaggtgaatttctctcttggatttgagaagcattctcttgacccctaccccagagtcttcctgaggggaaactgtgtgtgccttgttgtggcaggtgcaccatttgccccttaaactgctgtggagaagaaggaaatggaggggaaagaaacctcaaataccaggtttaaaagccccactgagttattttccgcctctgcaactgaatgtaaaatgatatgctggtgtcatttccatttttcctgcctttgtggtcctgaatgcagtattaactggcatgctacctccctggggattcaggtggccagaaaattgtctccagctcaaaagaggttgggagggtgatgagggggagatccccttatttctctgctcatcttagtaacttattgccttcagaattgtccttagtgattcaaatggcagaattgatgggccctgtttccttcctagtcctttcatttcctttaaacacaggtttggttttgtttaatggcattgttcaatagcccaagaggcccatgaatgcttctcttagggtgatgaatacatcggctaagaagtcatgaattgcaaaggtcagagttttcctattcaaaataattattaattgaatccagtgacctagggctgacctgcaacaaaattacagagctggtgaaatttgtctttgagattcctatccaggcgttctttttcagatttcttttttcttctttgataaaagaatgcctacgtattaactacctgttttgtgccataccttgtccaaatcctgtactagagttgatcttatttactgaatgctgaaatgtaccttatttgctgtagtcaccacccctgcggggtaggtggtactatccccattttgcaaatagaggaactgagactcagaagggtaaggctcttgcccaggatcaagcccagaccttcttatttcaaatcttatcttcactgtactttacaagtaccctaatacactgtccttattcttctatataaaatagcctcttatatgatgttatcttctctttaaacttatagtttagtaccaacttgctcaaagttatcacttgaatgattgacctcctcttttaggttcctgaggccatcataacaaattaccacaaactgagtggcttaaaactaaggaaatgtattctctcacagtcctggaagccagaagtctgaaatcaagctgttggcagggcatgctctctctgaaggctccagaggaatggatccttccttgcctcttcccagctgctggtggtggccggcagtccttggcattttttggcctggagacacatcattgcagtctccgactctgtcctcacgtggcattctccctgcgtgtctctgtgtctctgctttctcttcttataaggacaccacccattgggtcagggcccaccctaatccagtatcatctcatcttaactaattacacctgcaaaaaccctatttccatatcaaatcacattctgaggttctgggtggacatgaatttgggagggacattatttgtcacagtacagctctatgaaagaactttatgataatcaacaaacaattgggaaatttatttacttatttatttatttatttatttatttatttatgtatttttgagacagagtctcactctgtcgcccaggctggagtgcagtgccgcgatcgcggctcattgcaacctccgcctcctgagttctagcaattctcctgcctcagcctcccgagtagctgggatcacaggcacccgccaccacgcccagctaattttttgtatttttagtacaaatggggtttcgccatgttggccagggtggtctcacactcctgacctcaagtaattagcccgctgctgcctcccaaagtgctgggattacaggcctgagccaccacgcctggcctagaaatttctttaactagaggggtcttcctgcttacagatcaagtatccctacagagattattaagccattcattcattcattcactcaaccaacacttatggagcatctcctatggggctggcacttttgcaagcaccggggatatcgctatggaaagacaaagttcctgctctgtggtacctctatttgataaggcagacacttcatgccagaatggtgtgacaagcatagatctgagtcacacactctggctcaagtcacagttctgcttctcttagaaggaggcaccttgggcagtcactttgcctgtctcagcctgtttcctcgttgacagaaggcaatgccgagaccaccacagctttacaaatgttgggagaatctcctcaaggtagtgaacaaggagtgctccacaaatcgttttccacgttctcattcatgtgttggtgcgtctgacggatcctcagctgtaaaatggagatcctaataatctccgttattactgattgcattaaagaagttagtcagtgtgaagcatgaagagcattacctggctcacaacgagcactcacccagtcagtgttaggtgtcatcatcatcctgatatatactgtgcaggagggaaaattagaaaattctgcagcttgcttttgatatttcttggcatatgcctagtgtcacttatacttggagaactaaaaaatagcatcactggagatttggattgatggggacccatgaccactgggcattgagcctttgtggcaaaatctcagcaagacaaaacaatacccaggcactaaggaagaatattctggaagattctctgtgggacccagaaaagaatacatggccaccagttggctaccctggaagaaactgggctctacccaacattaaaggtggccaagaccccggcagtcagctaatctaactgcctctttctacaggcaaggcaggggcagcctagagagggaggaaaggaagaaataatactgattgcgtatctactgtgttcaggccacggagtacacaccttatagtcctcacaccagcctaacaaggcatcggagtgaggatctcctttgcataggcaaggaaacaaaggccaagaaaggcccaggccccatatttgggtcataataacatgcaaactggatccgtggttcagtagcccaggcctctttgcacatatagattattgctctgccctttatagtggggataaatttgttgagtggtggcatttggtctgtgaataaccagaggtcggtaatttgccagttatttccaagctgggaaactccaggccaagctggttttaccaagtggaacccgaaaatatatatatggtgcccttgcttctctggaatctggctgagggtctcagcatcgtatcccggctaggaccctcagctctcctgtttttcagctctcctgttgcagttatttattgctgggcaacaaatcaccccaaaacttagtggcttaacacagcactgatatgtcacctgccacagctctgtgggtaggtaatcgggcaggtctgctggtctcacctgggatcattcacatcactgtggtccgtggatggctggcagttggtgctggtctgcagtgccccagtcttcatcctccaggaggctggacaggtctttccatagcatgactgtctcagggcagcgttccaacagcgtgaaggctaggaactgcagggcttcctaataggcttcagaacgtgttcatcgttgcttctacctcattctactcatcagagcaagtcacagccagcccccattcaaagaactggagaaatagagtctctgcttcttgatgggaggagtgtcagtgtcagactgcaaaggggaatgcacatcgggggatactagcaactctttccagatttccaccagttatttgtgaggctaaagcagtgagagaatcaccatactcttcacacatagaccttgcaaagtgttggtactctgtcttggtttgcttcctcccttgggtataaaaatttttagtggcgatggcatgttatagttcagcgtgttgctgggaagattaaacataatgtatttaaatcacctgtgaaggtgcctcctacagagtagctccttagtcatactgtctgctgttgtcatggtgaccatcaccatcctttgtcctggggaccatgagaggagatggacatggagcttaatgcagggtgcaatggcttctccctggtggctaccatgatgcccctcagttccccagcaaactcatcagtggccctactttaggcccatcccaatggccctgtgcaccttttagtaaaaattgtgcagattgaggttcaaagttggaggagcaggggcagatacttgggttgcactcaagtcctaggctctactgacttggctgtccaggtgactggaggatttcacggatacagctgcattctcaggactcaaagccacccacagtctggcctggaggaggcggtgactctggggctccgagtccctgtgaagtgagtggccacaggagttgagaaaaccaagaatgaactagacaggagggttgtgctatgaagcacactcagtgttgtgggtgttcagtggagggaatggttattccacttgtgtggcaggggagtgtgtggggccatgaagaattgtcaagtttggggccaggcacagtggctcacccctgcagtctcagcactttgggagactgaggctggccaatcacctgaggtcaggagtttgagaccagcctgaccaacgtagtgaaaccccgtctctactaaaaatacaaaaatcagcagggcatggtgatgcgtgcctgtaatcccagctactcggggggctgaggcaggagaattgcttgaactctggaggcggaggttgcagtgagctgagatcgcgccactgcattccagcctgggcaacagagtaagactctggaaaaaaaaagaaaagaaaagaattgtcaagtttataccagcagagattgagaggggagaatcccagatgggcccagcctaaggaacgcttgcggcaaagaggaaagagtgaatcattggtttctcgggacccccccctccggttatgaaagggtgaggagtaggaatcaggctggaaaagtaggttggcattgggctatggagaaccccaaaaggccagtgtatgaatgggggcttggttcctggggcaaggaggcaaccaagacaccacctcatctgtagctccagagcaactattccatagccctgtgcccccagtttctctgtaactttaatcacaattaatattattccatttatataaaagaaggaccatactgaactttcatgagtggtggtggaggtaaggcaggaatccgacagtagggtgccaccactccgtgaaggtctctgagcctctgggtgctggagacgcaggtggtggcagagcaggcagagtgccctcctgtttcctgttctgggtagactgtgagtactggtttggactgggagtgaatggcctttggggagaaacttttgctcttagaattcagaggaacacacacatcttcccaagcatttccctttgccctctactgaggctgacagctctctgccctggcacctcctagactatgagtgatttaggttatgtctctttgcagtgctgagcagagcactttatacatcatgaggtctggatccatgtggggtgtgtgtgtgtgtgtgtgtgtgtgtgtgtttagagacagggtcttgctctgtcacccaagctagagcacagtggcacagtcatacctcaaggtaaccttgaactctggggcttaagtgattctcctgcttcagcctcccaagtagctgggatgtcaggtgtgcgccaccatgccttcctaattttttagtttttttagagatgaggtctcactatgttgccaaggctggtcttgaacttgtggcctcaagcgatcctcctgcctcagcttcccagagtgctgggattaaaggcatgagccactgcacccagcttagatatgtgtttgaacgggtggatttatgatctacttgtagccaagtggaaatgtttcaggcaagtactgagttcttattcgtcttgtgtctcctctgcagctggagctctcaaacactgctgtcctgcaccagatgcggcgggaccaggtgacagacacgtgccgagccaacagcgccacaagccgtaagcggagggtgctgacccccaacgacctgaagcacttggtggtggatgaggaccacgagctcatctactgctacgtgcccaaggtggcctgcaccaactggaagcggctcatgatggtcctgaccgggcgggggaagtacagcgaccccatggagatcccggccaacgaggcacacgtctccgccaacctgaagaccctgaaccagtacagcatcccagaaatcaaccaccgcttgaaaagctacatgaagttcctgtttgtccgggagcccttcgagaggctagtgtccgcctaccgcaacaagttcacccagaagtacaacatctccttccacaagcggtacggcaccaagatcatcaaacgccagcggaagaacgccacccaggaggccctgcgcaaaggggacgatgtcaaattcgaggagtttgtggcctatctcatcgacccacacacccagcgggaggagcctttcaacgaacactggcaaaccgtctactcactctgccatccctgccacatccactatgacctcgtgggcaagtacgagacactggaagaggattctaattacgtcctgcagctggcaggagtgggcagctacctgaagttccccacctatgcaaagtctacgagaactactgatgaaatgaccacagaattcttccagaacatcagctcagagcaccaaacgcagctgtacgaagtctacaaactcgattttttaatgttcaattactcagtgccaagctacctgaaattggaataaagggggtggggagagggagagaatcatgctttttaatttaagatttttatttgtcaaaagaattatatggatattgggttattttgtaaattaatatttctttggggatgatgctgcgagcagcatagtgagaattatttaaaatccttcgtagggaaggacagctgtctttgcaggggaaataggatgggtcgtccttgtctgtagaagtgaatactgcaacactgtctcaaaggtttcttgtgttctggtgaattccatgaattgtgcattccataaattctaattaatattatttatagttatttaaacatggtctcattatttctttttgtggcagcaaaattctaacatctttccagaagaaatctatgattcctgctttgcttgctacagctcatttgggggcatgaatgttctccttactaacctctcatggagtcatgtgataacagccattgtcatgtgtatggatgccaccattcttgaatttctgctagaaataagtaggttgctattgcacttagagtcatctttgcaagggactcattccaaaccaattccaatcgacctgaaagtcccttgcactaaagaaatgtgatttttttttaacccaaggagaaagttggttgtaacaatttttcaccagaattagcaatctgatagaataggcttttttaacaggaattttaaactggcggtgccagttgcagtgaaggtgaagtggctattgctttatattcgacaaatatttattgagcatctactatatactaggccctgaagatagagcgttgaacaaacccaatagtcttggccctcaaaaagctttatgtgacatagagcatccagctcgacaattagcaaacccctgatattattcatggacttgacatgaggtttggactattcatgagcaacagcagaaggtccatgacccctacaaatttacatttttctatggcccatatttgaaaacctcacattcggagcaggccactttatattcgtgagtgatcccaagctcactgaccaacagaaaagatgctaaaaaaatgtgtcctatcatgtgcctgctccaactgatgggtaatgtctgcctttaagccccagaatggattctccaggcacagtgtggaagagtgctgtggttgattagcaatgtctgccttgggtgaggaaaggggaacactcctcaagtgcctcctactgtcatctccattcagcctagcaccacatccccatgtagaagtgttgtcttctactgcttgccacgtacaagtgtgaaatgccaaggtgagactcgtacacttggggatttgcaatggtttttacccctcatgaaggtcagaggtggactatttgtacacatacacacatgcacaccctctcacgtcctccagaggctgaaagactatcagcatcttggtaactgccatgcatgagcagcaaggacagccttccataatccatgccccatttcctctggaagcctggaaacttttcatttcctgttccttgctaattaacatctaaacatgcttctcatttccagccattgctgatgcttctcagttgaagtttgagccacatccctcttacagctagtgaatgagttggtagcagctactgtatataataataataatagttttaataataggggagggtgggatggggtgtgggtaagttttgccttttgttttgtttttgatgccgtatatagtgaaggggtgaggatattctaaacaaacaaaaattgaataatttattcacagaaactattaagattgtattgtaaagctcacagcaagctcagtgggcagcagctgcaacatctcaccggggaaattattttatttaacgtgagtgagatgtgggccggagaaggtagctgaagctatttataaaacgttgtgtaccttcttccgagctctctcccctttgtgaagggcgcagcaactatacccttgatggatggagatttacgcaatgtgttttactgggtagagtgacagaccttggctgtccctggaattgagaatctggaccttatttccaggcagagaacactgtcctcagaaatgggacttctgataatgaaacaggttgtccaacattttctaatacgcattctacagaacacaggttccaggaggcatcaggttggtgtgatgcagactaagggttttgtggtcaaatatccttaagaaacaaagttaagtcagtttcctttctgcaaggacttttcagccttcaatgtgtgctgtgcatggtgaatccccaaaaataatccttgagtctgtagcatttcctgaacttacatgaccaggatactctattttgcagatcaccccacagagctagggttccaccgagtatactttgcttaggttgacttagcatatctgaggtcttcaaggataaaaactgccaccccaacacccttccattaaaaaaaaaatacaaaatagcaccacagtctccatctggtttatagcaacagaggtactttatttaatgaagcaatggttctaatcctggatactgccacggactacaattctatccctcccagagggagtggaggaagtcttgggtggtgtggacagaaggaagagaggagagggtgagtggggtatagggcccagggtggctccctactcctcaggctcaaaaggatgctcagtgggaacagatgatctcttgatgagtgcttcttcagtttcatagtttggaatcgttcactgtgtgctttttggggggttttcaatggaaattcacgttgctttgcatttctgtgtccgtctttggtcagttgtgcaagcctgctcactgtcatgtgaagatggcctttcatctggcttctctctcttaagtgagaaagattgtccttcaggggacatgacatcaataggtttctggaatgagggactctttctccccgtgttttgctttgtgttcacattttcttttctaatggcattgaaactttaaaaaaaatggattcaactgtttttgcagaatgtagaaagtattctgtgtccttggttaaagaaatccacttgtgaagtgtgcctggaaaatgaaagtttgtgttttttaaagaggaatatttgaaactgctttctatgcatgcttagctggagaaaagtacaggcaggcgtcccatctcccagccacttctcaaaggtgctgctgtgttttaaagaccaggtacagccagggcagtatttgcaaggacattcctgcttactttatccctttggttggaaagctctagatgattcccgcagctcctccagaccccgcctccctgccctccccagctggtctgggaagaggtggtctgctgacctgtggtatctcagaggggacgttcctcctcctccctgtgcaccaggtgggctgcaccctcctgcctattcaggatgtggatgccacaggagagcagcaggcagtggaaacttcagttgcactggttctcctggtggcaaaggcatgaagcacaggggtcgattaatccaggctactagaaagctccagagcaaagtgtgcgggtcccacaaatgcttggctggtggggtctggatcagtgctgagatagagttggcagaagaagcagaggcactctgcttgctttcctagccagtcctcccctacacacacacacacacacacacacacacacacacacaatctcagctgcgccattctgtgcaatcccagtgaccaaatcccttccttgcccacctctatgtcagcaggactgaccacatcactcccccgagttcccaccaccagcatttcctccaacctttttccatcacaaccagttagaaccctacaggcaacaaggccttctagaatccgcttaacccttggctgataacaggcaaatttcagtctgctacactttgttaggtccagaaggagctgcccatactactttcttatgagcatgctcagtatggcatatggacatgtaatgtcacatctttgtggagtgtgattttcttttttcacatatttgtatgcagtagagagcctgttgtagaaaacgctccctgtatcttgctgtactgttaaagaaagctgaattccacattgccaacaaaagcgtgaaaatgttcatgaaccttcctccaggaaaagccattcaagcctgattatttttctaagtaacttcaattaaattgaagaaaaaagaagctgctttctgtgtatggtttgctcatggctcattaacaaaagactgtaggggtggggtgggccgtggaccttagcatgcggggggccctgctcatgtgtatcaaaggatggagatgcaggcttcgttggaagactcagccctggtaaaaaccgccatagatccaaattctttctgttcatcgggtgaatggaagcttttcttctttccattttttctataaagtctttgtagactaatgcattagaaggtgcactgtgatcacacagttccaccactcgtgtgaaaaggcatgaaggctgtcagtaaatggctttggtggcagagccagtattcaagcccaggttgatgtgccttcagaactccatgtttttggcactgaatgacatgcctctctaaatggccatccatggtgccactgctaggaagttgcaagcctgcacttcaagtcccagtttttcaattccaaatccaatcctgttctgattccccacatagcttatttcggctctatggatgagcatcttttagcttttttttttttttttttttggaaacggagtcacactctgttgccaggcgggagtgcagtggtgagatctcggctcactgcaacctccacctcctgggttcaagtgattctcctccctcagccccagagtagctgggactacaggtgtgcaccaccacacccagctaatttttgtatttttagtaaagatggggtttcaccatgttggccaggatggtctcgatccctcgaccttgttatccacccgccccagcctcccaaagtgctgggattacaggcatgagccaccgtgcctggctgcatcttttagctttattggtaaaaatgatttctgtatatttttccaaagaagaaattatactcaatgttgtttctgtttttcattgtattctaatttaattttcttttaagagacaaggtctcactctgtcacccaggctggagtgcagtggcacgatcgtaactcactgcagccttgacctgggtgcaagcgatctcccggcacagcctccaaaatacccaaggattataggcgtgtgccaccatgcccggctaaccaatttctttaaacataacatctaaacatttttaacattacaatattgggtgagaaaatagatcccgttttcaaccatgctagatatggtttctaatcaccagctggctttccccactggtagctggtgcccacccatgggcatgatatccaaaaagaccaggaaccattggctaagaatacatttggccaagaatacattgctagtgtcatcactgtccttgctatggtcccatctggttgggaaatgcccagaccacagagcttagtcatcttagattcatagaaaacatacatcctttttcatcagtgaatggatgtgactttgcgatagcctgtctctgtctcatttggaacattgtaaatgtcagtgggaagcaaagctagacgaggtcatctctagcctgtttgct

SEQ ID NO: 108 - DNA, 12452 bp, Homo sapiens
  source 1..12452: mol_type = genomic DNA
gttcctgccaatggcatggctgatggttacccggctctcctggatgtgcccccgcagctgcaggagagggagaatcgcacgcagttcacggggcagcccagtgctgccggggagcccacctaacaccaagcaaccacgtagagcgtggtgggaggctctgagccagggctgcccaagtggggtgggaatcctgagtccccacgccccaccccaggactgaccaggtcttaccaatgccaggtaagccttggtcacgcgccgctccttgaagcacctgtacgcgctgccggcggctgccttgtttagggccacgcacagcgccccgctggtggagaaatccagctggtggcagaacctggagtgggacagagtccagagtctgagccactttcctccacagacgccaccgtggggctccggccgccccccctacctgaacccgtagcaggtgtcagggtcggccagctcgggaaagcggtaccgcagctgcttctgcagggtcagagtctcccgccacgccttgctgtcaatgcgaacgtcccagtgcttgttgaccaccaggaagtcgcggctccggtacacgatggacaggttctccacgctgcctggctccatggccggcctgccgagccacgcgtgggtgcgtgtgctgtgagcacgtggtgcgcccccagcccagcatacagaggtacccgcaccgccccacccgggctccggtgcgaagccaccgagccgggtccgcagccctactgtgcacctgcatcctcagtccccgagatcagtccccagggcgtcagctggggagtcaaggagtcagcctgctccgggctgacctgaagggccctgcctgacctaagcctggagaaagagcccgttccaaacctgccccacagatcctccccacagaccctcccctccaggggatgcacgtgaatgcctctgcccgacggtgggggcggggaggggctgcagcactaccaggcccggcagccaggtctgcccgcagcgcgggttagggctggggcctcctcgctccccgcagtccgcgcagacccgcgccccgcacaggcccggtgggcaggccgaccctggctccgagcccctcccgcgcccacgcccacgccaagaccaacctgctgccgggccgtgcagtccaggcccccgatgccgtgcccggcgccggctccagccgcgcgcccgcgcgctggcgacccagagaccctggaagctccgctccggacgcctggcagcgcttccgccctgcaccgctgcgcgcgcagccccgcccccccccccggcccgcccccggcccgcccccgccgcggaagggcggctgcggcggccaatggcgagctccccaggacaggacgcgggggctgcggagcaggaactcgccccgcccacccctcgcgcagccccgcctccgccacgccaaccaatggcgcgcgccgccgggcacgccggctgctgattggcggcgcccggcacgctcggggcgggcagtgcgcgacggcggcggcggcgcgggaggttcggagcgggagctcgggctcgcggacggtatggaggactacgagcaggagctgtgcggcgtcgaggatgatttccacaaccagttcgcggccgagctggaggtgctggcagagctggaaggtggggcgcggcccccggccgttggggaggagctgcgaaagccgggacagtggcgacctcggggagggcgtgccgggggccgaaggggcctccacgtcgccgctggcgggatctgctgtctcggggcggccgctgacaatctcctctcccagcaggggcgtcgactccgtcgccctccggggtccccctgttcaccgcgggccgacccccgcggacgttcgaggaggcccttgccagaggggacgcggcctccagtcccgccccagccgcatctgtgggcagcagccagggcggcgccaggaagaggcaggtggacgccgacctgcagccggccgggtccctgccccacggtaggttggcggcattgccccagggcctccggagtgggcgcgaggctgaggaggcctctggttccctgcatgtgtctcccccagcccccaggatcaaacggcctaggctgcaggtggtcaagaggctgaacttcagatcggaggagatggaggagccgccccctcccgactcctcgccgacggacatcaccccgccgccgagccctgaggacctcgcagagctttggggccacgggtgtgtggcttggacatgggcgtcccatcccatctgtccagtgggactcagatggagcccatcccgtgccctggatgaggcctggggggtggggagggttccatggctgagagcagtctcggacacccatatccaagggtgaccccacgcttgagtttctgccactgagccccggtctctctccagagtctcagaagctgctgccgacgtgggtctcacacgggcctcaccagctgcccgcaatcccgtcctgaggcggccccccatcttggaggactacgtccacgtgacatccacggagggcgtccgggcttatctggtgctgcgtgctgaccccatggccccgggggtgcaggtgcgtggctgtggccttcctgcacggtgggtgggccagtgctgctcaggaaagggtccttggagcccctcacccctgccatttgcttaaagcgggtcctgtgcagagccccaggggtgcagagggggaggctgcgtcatggggcgtagacttagaggacacagcctccccacagcaggttgctgtccagcctgtttgtatggcctcgggtggagagggcctccttgcttcccctcctgcttttgccctttcctcctttctcctaaagctgcccccaatttccctttgcagctgacccatctggatggcttcattcctttggcacccctgtccagtctcccacccctcactggccagcttactggggttgtcccacccgggtccctgagcactgatgggggctgacgtgaatcctgtgacctaggaggggcccagaggcaattgtcctcccttccccacagggctctctcctccacgtcccatggcgaggcggtggccagctggacctgctgggtgtgtccttagcctccctgaagaagcaggtcgacggcgaggtaggggctgcgggtttgctggggggcggtggcggggccgcctgagccctcctgattccagcctgttgtttgcacagcggcgggagcggctgcttcaggaggcccagaagctttcagacaccctgcacaggtgacttggttggcccttccgccctggggacccttgttggctcttgcaccaactcctagctcctagcgtgtgggttggcatggtccctgcgagttgtttgtggctcaggacgtggtcctctccagtctcaggtcgggggaggaggaggcagcccagcccttgggggcccctgaggaggagccgactgacggtcaagacgcctccagtcactgcctctgggtggatgagtttgcaccccgccactacacggagctgctcagtgatgacgtgaggtcttgttctcactcaagtgtggctggcttcctctgttcccaagatggaagaacctgggcccagtgatttttgcacagccaatccactgggcctcggagacggagtgggctctggtttgcccttttgagttgtaggtggtgaactgagcacagggctgtgtgctactggtcccctgtgacctgtgaggcaggctaggggtccagggtgtcacctgatccaagtctctgttccctttcctaccttcacagcagctgacactggagtgcccctggggagggcaggggcctcccagatgggttgtggccagagccgtgggggtggagcccctggtgtgagccttgcggtcactcgctggcaggaagacgggggtggccattcatcctgtggcttggcatcccatggggcatggggctcatggtggcaggtggactgtccgtgcctggaggcggtgccctcaggctgtgcttcccttcccgtccttcccgcagttcaccaaccgctgcctgctcaagtggctgaagttgtgggacctggtggtgtttggccacgagaggccttcccggaagcccaggcccagtgttgagccggcccgggtcagcaaggaggccacagccccaggcaagtggaagagccacgaacaggtgctggaggagatgctggaggctgggctggacccgagccagcgaccgaagcagaaggtgagccccgctggctgtgccgccgggaacaagcctgaggctttgcactcggcgccggcacccttgcagcctgttgactttctccaggagccgtgggtgtggtgacgtgtgggtcttggcgtgaagcgccattagcgtgagttagaactggagcgttgcagtaacaactcgggggaagtcgttgtccctgaagggctctgcggctggccaggatgatctgggtggacggtgggtggtttctgggggccagtcacactggtatcagctgtgttttgtctgcacgaactttgctttgtgtaggtttttttttccgttgccatcttggtgtgtgaaagtgctcaattttgttcttatttgatggctggagtggggtggagggagcgcccagcctgtgggacacatgtggcagtccctggctgctaggccgggagcgtcctgtaggtgcggtgcacactacgccttcatctacctgggctgcaggtggcactgctctgtgggcccccggggctggggaagaccaccctggcacacgtgattgcgcgtcacgcggggtactctgtggtggagatgaacgccaggtgagtgatgtgaggtccgtctctggctcgccttctgtcctgacgtgtttgagttctggtggcggacctgaaaccgggtgtggatgttcccgtcttgagggtggtgggggcctgggtgtgtgggccgggaaaacgtgtccttcctcggggttcacgggatcggcagcagccgcgtcatgtgacggtctccacgcaaatgcggcagccccggccttgggaggctgccctgccagggacgcccactgccctgacgacccctgacctccccattgcagtgacgaccgtagcccggaggtcttccgcacacgcatcgaggcggccacccagatggagtcggtgctgggtgctggcgggaagcccaactgcctggtcatcgatgagatcgacggggcccccgtggtgggctccttgatgcctgggtaggtgggtgggcgggcaggcaggcgggcagcagggcctggactcaccgtgtcctctgacctcccccaaggccgccatcaacgtcctcctgagcatcctgaaccgcaaggggccacaggaggtggggccacagggcccggctgtgccttcgggaggcggccgacggcgccgggcagagggggggctcctcatgaggcccattatctgcatttgcaatgaccagtgagtgcatgggcgggcgccacagtcaggagaggctctggtgcctggagggagggttccggcccgtccctgtgtcctgggctgtggtgccaaccctggggtccctggccctgccgcctctcctcaggttcgcaccgtccctgcggcagctgaagcagcaggccttcctgctccacttcccgccgactctgccctcgaggctggtgcagcggctccaggaggtcggtggagccccaggagccgtgtggctgatggcggggttgggggcgtggcctcgttctggcccctgtttccctgcccctccccatggaaccctggtaacccctgaaaggatggggcataccatcgggccctccagcagcccttctccaccaggtctccctgcggcagggcatgagggccgacccaggggtgctggccgccctctgtgagaaaactgacaatgacatccgggcctgcatcaacaccctgcaggtgggcggccggcaggcaccgggtggggtggggtggggtcaggagttggccgcttctcatgcccccgccctatgtctagttcctgtacagccggggccagcgggagctgagcgtgcgggacgtgcaggccacacgcgtgggcctcaaggaccagcgcagagggctcttctcggtgtggcaggaggtcttccagctgcctcgagcccagaggtaggcggtggccacagcctcggcccagatgctcacggtgcccggacctcaggacgctagccctgtgtgcaggccagcactaccttcgaggcggggactcagtgtcctgagcccgcggttgcctggtccagcctccagggccctcctcagccttttcctggcttgttctcgcccctacagccttggggggtcagctagagaagcctccagggccccctgtgggaaggacacccccagtgtggtggggcctccagggcgtccctctccagggcgccccttgactcagctgctgtcccagttgcaccctcatttttgccacatttggcctgggctgtggtctctgagcccctgcctgcccacactgcttggcctcccgtgggcaggagcagccagcatgtctctgtcctgacgtgccatgggaccccaggggatgctggcctggtcgtgctgcaggatatgggagacgctggcctgggcctgtgggatgtgctgctcctggcctggacccggagggggactttccctggggtcccctaaccccagagggtcagggcagggctcctctcagagtggggctcctcggcttaagggaatgtttcagggggttgaggtccgggcgtgtctttggctgtctccacctgagcgaggcagcaagggccctgctgagaagaatgaagtgggtggcagctctgatggggcctctgagtgtcccggggagacgggtggggctgcctgtgcttttaacacgggtccatctagcttcagcaccccacctgcaggcgccgtgtgggccaggaccccgccctgcctgctgacacactcctgctgggtgacggggacgcgggctccctcacctccgcctcacagcgattctaccgtgtcctgcatgccgctgcctctgcgggcgagcacgagaaggtggtccaggtacctgtcttccaccaaaatgcctgcctggggccgcctggctaggacctgggctgtgcccctgcccctgccggtcctcccgtatggacggggaggcgctttgggggtgctgagagaggcaggttcgggaaatggggtgccaggaagtctctgaggtggggagcaggagccaggagggtgggaggggctgcagggcacgggccggcaggcaaggaggtaggggcggccgtctgacgggggaggtcgctctggtggctgcttgggactctcagcgggttggggtggagcccctgccggacagcctggcctggggctgcgaggggctggattctggacttaagatgcacatggggtggagagcagtgcggtgagggcttcctgccgccctgcccgcgggagtccccgcctaagctgtctgctgactctaagcggctttggattagcagctggggatccacaaccaatccccaaatcccaaaagccgcgatgtggaggggcagcgtggagcagcggcggggatagactcccccacggaacaggggtggggacgccacggcctggactctggtgggcggaacttcctcaggcagtctaaggaggggctgagtgaggctggatccctttggttcctggaggcctcctggtgggtcaccccctcgtgtcagtctctgtcaagtcagtctctgtcaagctgtagcgaggatgctcagggtggaccctcccccgaccccttgggcccagtgaccccttgctggtgtgtgctgctgcctcagacgcccagcgtcgtggggacccttgtggagggtctgcgaagcctcgtggggcaggcggcaggcaggagtggagggtctgtggcgggaggtggagggtccgtggtggtgcaccttccctggggtgggcaggagctcaggggttgccggccgcctgcagggcttgtttgacaacttcctgcgtctgcggctgcgagactccagcctgggtgctgtgtgtgtggccctcgactggctggccttcgatgacctgctggcgggggctgctcatcacagccagagcttccagctgctgcgctacccacccttcctgcccgtggccttccatgtgctgtttgcttccagccacacacccaggatcaccttccccagcagccagcaggaggtgtgctcgtccctgcaccacgcctgcccccggccccgtgcccgcccccctgtgctgcccgtgtggctgcccccggccccgtgcccgcccccccaaacacactgcccgtgtggctgcccccggccccgtgcccgcccccccaaacacactgcccgtgtggctgcccccggccccgtgcccgcccccccaaacacactgcccgtgtggctgcccccggccccgtgcccgcccccctgtgctgcccgtgtggctgccctggccccacccaccattcccccctcgcccgggaggcccaggtgaccaggccttggctcaccccctgccccaggcccagaaccggatgagccagatgaggaacctgatccagacgctggtgtccggcatcgcgccagccacgcgcagccgggccacgccccaggccctgctcctcgatgccctctgcctgctcctggacattcttgcacccaagctccgccccgtgagtgccgtccccggggtgggggattccccgcctgctgccctcctgtcctaggtgagcacacatttgtacagcctgctcagctccctgtctgctgcctcccatcccctaggtgagcacacagctgtacagcacccgtgaaaagcaacagctggccagcctggtgggcacgatgctcgcttacagcctgacctaccgccaggagcgcacgcccgatggccagtacatctacaggctggagccgtgagtcccccagtgcctggggtgtgctccagggtcatgctccccggctgtgctccatgttcagggcccgcatggggccaggagtctgaaagcacggtcatggcgtctgggggtggcgggccccagcttatcttttgctcagatgtaaccgtgaaggggggtcacttccagctacttgagattggctctgggacctgagttttgctgcagagctgctcccagccttagcacccccacatggaactggagccgggggccccgagagtgactgcactttccaacactccgtttcccgctgtgggatggccatgggggtggtgggggtgaggcatggggcagtggccccggggtcctgctgccccagcgacggcaccaacttgcaggacgctgagtcactctccgtggcagccatcggcaggtttcatcatcatcccacgtacacttgcagttggggaaactgaggctcggggcagttaaacctggctgccgcagggttggggtgcggtggcaccaggactcagccccacattcctgctctggccttgtggcttttggggtttgcggttggagtgcccggcggctctctggccctgagcctggccccgctgacctgccctggtgtccccctgtgctgagcaggaacgtggaggaactctgccgcttccctgagctgcctgcccgcaagcccctcacctaccagacgaagcagctcatcgcccgcgagatcgaggtggagaagatgcggcgggcggaggcttctgcccgggtagagaacagcccccaggtgagcccacccaggctctggagcaggttgcagtctgggcgtgcaccatccccactgtatccctgtgtggccagatctcacaatgcctgctccctacaggtggatgggagccccccagggctcgagggtctgctggggggcattggggagaaaggggtgcaccgacctgccccacgcaaccatgagcagcggctggagcacatcatgaggcgagcggcccgggaggaacaggtgtggaatgggcagctgtgggggtgggaccagggtacatacctttgggggtgtggctagggcagtcatgaggcggggccaaggcacccatggggtggggccagggtacctttgtgggtgtggctagggcccctcatgaggcagggccagggtaccttcagggctgtggctagggcagtcatgaggcggggccagggtatctttaggggtggggccaaggcacccatggggtggggccagggtacctttgggggtggggctgagccacaggaggagtctggctgagggtggggctggctcagtgccctaaggggggctctgaaggaccagctccttaccctcagcatgaccagggttctacccaggcctcagtttcccatctgggcagaagagtggctgtattggctcttcttgattggcacctggtggggagcagatggcagtgaggggtgaggggcagctggcctgggccaggttccgaaaggtgtctcagaggtgttctggtccctcctccctgggaaggctctcggtcctcctgtcttgggtaggggctggatggggcatctgtcctatacgactgactagtccttcctcccatcagcctgagaaggacttctttggacgtgtggtcgtcaggagcacagcagtcccgagtgcaggtgtgtgtgggggtgttgtggggttgtggggggcctgggggttgtgggggggccttacagctgaggagcaaccctgtggccccgcaggggacacggccccggagcaggactcagtggagcggcgcatgggcacagcggtgggcaggagcgaggtctggttccgcttcaacgagggtgtctccaacgccgtgcggcgcagcctgtacatcagggacttgctctagttctctgagccgcggacatgccctcgcattgcttcccgcagagtgcagagacaggaagctggagatgtctttataaagtcacacctttacagactgtaatcacgtgcgagtggagtggggttcacaggatggtgggagtggggccgggcgtgggctcataggatggtgtgagtggggccaggagtggggctcacaggatggtgggagtggggccaggcgtggtctcacaggatagagtgagtggggccgggcgtggtctcacaggatggagtgaatggggccgggcacagtcttacaagatgttgtgagtggggccgggagtggggctcacaggttggtgtgagtggggctgggagtggggctcacaggatggagtgagtggggccgggagtggggctcacaggatggtgggagtggggctgggagtggggctcacaggatggtgggagtggggctggaagtggggctcacaggatggtgggagtggggctgggagtgggactcacaggatggagtgaatggggctgggcatagtcttacaagatggagtgagtggggccgggagtggggctcacaggttggtgtgagtggggccgggcatgggctcacaggatggtgggagtggggctgggagtgggactcacaggatggagtgagtggggctgggcacagtcttacaagatggtgggagtggggccgggcgtggtctcacaggatggtgtgagaggggccgggtgcggggctcacaggatggtgcatttgcccttttccacccatgggttgttcttcatcaggtcggggttcaggaaggggtccttggggatcccgtcctcgatccacttcagcagcctgcgggtgggcgggtggcaggtgagtggtggcacctgacccccgagggcctcctgctgcacctgcctgtcggcggcggtggtcgtggctatggaaatgagcagccagcgcagggcagacaaatgagaggcaaatcaggcaggtggggcactcactcggggatggtcttggacgccatctcccgctggaaggccagctggtacttgaggctctccacctctttcttcatctgtggcacgtcccactcctccatggggtcaggggcttctgaagcagccagcctggggctggagggcacaggaggaagccacagggccgaggccaccagcctgtagtccccacccccgctgctccccgcaggcctgagctgaaccccgcaggatgaagcggggagagtccacaccactgcctgggccagtcccctaggcgttgctagggtgcagggcacagagcgagttcccacaaggccccagctcccgcctcctgcactgggactaattaactgcaagaaactttacatcctcagctactcccccataggcccccacaccttacgaagatcccttgcaggcaggagaaagggtgctcagcacggcaggcccccagctcctaccctcccactgaggcccacgcaggctgacccagaccacggtgtgaggtgtggggcgaggtcctcaggaggtggcccctgccccgccccgctgtgtgcccctttgctttgcatggcagagcccagtccagagccaggac

SEQ ID NO: 109 - DNA, 149157 bp, Homo sapiens
  source 1..149157: mol_type = genomic DNA
ggtttccacattgcaaaataacataggtcccaaatcacaagacacagaaaaatcaatctggatgatttaaaaacttaaatacgtaagttaaaattttgaagttttttgaagtaaaggggaaatatttattttttttaggtagagatttctttttcttttctgtttttttttttttttttttcgagacaagatctcagctctgtcacctgggttggagtgtgtggcgcaatcatggctcactgaagccttgacctcacaggctcaaggcatcctcctcccacctcagcctcccaactggctgggactacaggcctgcaccacaacacccagctaatttttgtattttttatagagccagtgtctcaatatgttgcccagtctagtctcaaacccctggcctcaagtgatcctcccacctcggcctcccaaagtgctgggattacagctgggagccatcatgccaggcccaagatagggatttcttaatcaagatctcaaaccacaaatcgcttggtgaaacttgataaatttagctatcttaaaaccaagactctttctcaaatggccacataaagacaaaccacaaactgggggaagatacctgcaacataaataatccacaaaagattactatcttgagtatatagataactaaaaataaattataaaaaatcaaacaactcaatagataagtgagcaaaagttgcatatttcactgtagacaaaaacataaccaataaacacaaaaaaagatgctcaacctccttagtaatcagaaaatataaattagtaatcataatgtgacacctttatacccatcaggctggccaaaagaaaaaataataatcttgacaaccccacaataccaagtgttatgaagtggaacacgtaggacttacccactgccagtggaactctaaattgctataactacttagtcaaacaatttagcattatctataaagttaaagatgactgtttcctacaccctagcaaaattctgattgtaggatacgccctagagaaactctcactcacgtgcacaagaagaaatgcacaagaatgtttatagctacgccaatggttattacggagaaaacggaacagcacgaatgttcagtcagctccaggaacatgaataaatcatgttcgttaaattgcatttaatgaaatactatattcagctgtaatatttaatgaatgacagctacattcctgagcatggataaatccctcaaatacagtgttacatgaaaaaaataggttatgggagaatttctacaatatgattcaattatgtaaagattcaaaagcaagcgagactaaagcaactggtcaaataagctttaactgttactgtataatttgtactttgtaatatctggtagtcgcatggttcgttaagcttcaggctaacagaaaattaagcattaactatggtgccaagttaaaaaaaagtctgcgaaatcaaaacccttaaaattcgtctacgaaattttaataaatatccgtgtagaaaatcagaacgactctttcaggccatctttaaaatgtcattggtaaaccatacttgatcctaaattcctgtacttcctcaggccatccgagcatgaaacgctgtcacctacccacatccgctggctgtgacgcttgtcaaagtgttctctatcggctgcatgcctagaccaccaaagcgttctgaccggacagtgtcactggagaaggcggcgcgacatgtccagggcgcagatctgggctctggtgtctggtgtcggagggtttggagctctcgttgctgctaccacgtccaatgagtggaaagtgaccacgcgagcctcctcggtgataacagccacttgggtttaccagggtctgtggatgaactgcgcaggtaacgcgttgggttctttccattgccgaccgcattttactatcttcaaagtagcaggtaaatataatggctttgtttggggtggaggtaaaatgtacttttccccccgactgtgctgaagtagctgtctatggctggctgttaactctctgaagactgagtgcttaatcaaagtgccaagatttgcctaggaaggatggggtgtatgagtattggctgaaagaatgacatttatcttatttgacaaaggagatgtaagaataaccttacagggcttttggaatacccagtgtgactccaaagggaagagtggaagtgactggattgttttaaaagtcagtttcaatttgccttgagtcatggaggaatcttgatgggtcagcacccctatgtaggaaatgctctcattgatttaaacttgtctctccctctcttcctctctctctctctctctgtctctctctctctatatatatatacacccacaaacacacacacacacacacacagaggtatctatatgtgtgtgtgtatatatatatgcacacgtgtgtatatatatatgcacacatgtgtgtatatatacattcacatatataacccacacaggtatctatatgaatatatatacatatattcatgcacacacatatgtaacacacatatatatgtaatatgccattgctagattggaactggcaaacgatggcaaattcaaactggcttttaaaacaatccaaccacttccactctttcctttggagtcacactgagcattccaaaaggcctgtaaggtaatccgtatgtctccttacatctactttatcctagattcctgataacgaaggaaggaattctattttcagaagggtttccacgttttttttaatgtttgtcacagcctagatataaaacaaaacgaaacaaaaaaccatattgaatgataaaataacagcaagaaaaatttgaaagcggttaagtgaaagaaaatgctgtttactttcccctttggttacctgattttatttatctaagaatacatggggcaagctttcatcgttgtgcatattagaaactctattacaagtgtacgtatctcaaagagggaacatatattttttaaggacattttcatactccagaatgccttcagggaaacaattgtcatttgctttcctgtcattatgagaattactatctgcctctgctttctgcaaatttgatacatttacaaatctgccacaaattgtgggtttattactttaaaaattgctctttgtttcttggtaaaatatagacttttcacagtcaaatagtaaaactgtaccttggccccagtaaagaaaatgaaataaaattttaactaggaagttactaaagcataatgtgttaggagattttgtgtcaagtatgcacatcattagtctacaatgagtgccaggggataaagagagaatacttaactaaatccaggagatttctaatgacaatcaaaagaaatattcaagcgtggatgcctcacttagtccctgaaataacatggactttcctaagtacccatttgaggactccatgctatgtctctcttcagggtcaatttctaaacttattttgggtatttcaacactgatccttctaatatagaacactgccctagaaacagaggaaaagaagagtgtgtgtggagaccctcttgtcactctgcacctcttacaatcgttctttctccaggggcccctcttggccctttttcaccttaggaatcaggtagaagagatggcatatggtaagtctgtttgtttttaattgggttcattttttatttgttcaattattatatatattttttgagatggggtttctctatgttgccaaggctggtctcgatctcctgagctcaagagagtcacctgtctctgactctcaaaatgctgagattataggcctgagccaccttgcccggcctcatcttaaaaaaaaaaaaaagaaaattgtcttaatatgtttcattctgtatttcttaatgaaacccagttattggggaaaacatgtgttcaactttagcttcaaagtgggttaaagaaccatggtaccttttacatgacttcaacttgctgcttccccaaacacatcatcacagagttaggcattttattatggtccagatatctctcacccttaacactttcttattttttatttattgtttttgagacagaaccttgctttgttgccaaggttggagtgcagtggtacaatctcagttcactgcaacctccacctcccgggttcaagtgatcctcccacctcagcctcccaagtagctgggagtacaagtgcatgccacaacacttggctaatttttaaaggtttctgtagagatcagatctcactatgttacctaggctagtgttgaactcctgggctcaagcaatcctactgccttggcctcttaacgtgctgggattataagcatgagccaccacgcctgccaaaactttatttttaaagttaactttgtttattgattgtaaaaataatttattctatctcctgtataccctgcacataggaggtaatttgaaaatctcacccactgacaatgcttccctaagaacaagtacaattaaattaatataatctctctaccttcttcatcctgagtcaaaatctttataaatgatacactttgctgcagaaatctgttttcaatgtcagaaacactgattcatatttccaaagaaaacggggattcacacatttggatttcctttcccatggagtcattgctggttgcttttcttttattcctatttgaaaacataacaatgagggaatcaggaaagctatctatgccaataatctctccaacatcacaataattataaattgagaaaagaactcagaagtcaatgaagaatgaaaatggttatatcaccttttaaaataataaactatttaagcctatattgtcaatttgagacaaatcttcttagacttaggccagattaaacctcctctaagaaagaaaagcagaaaatctgtctaagctgtctcggttgtattttttttttcttgctgattatataacttcattgctggagtcataccttcccatagctaaccctcttgaatgctccagtgtagccacagctttttagggcttcatttggattaatagtgactacatcccttaaaaatttgatgtgagcaaacacctctttgggtgagcagcatttatagctatagtaaaaaatacagaggccaccttcaactgtcattctgtgaaataaaccgtaggaacacctgcaattcaattcttattggagcctgaaagcttgattaaaatccaaagccaattcactatctttagacactaagtctaccataagctaggtctcgttttgttgtgttttgtttttctgtcatatctacgttaataggaatgctttcactatgaaagtaaagcatctctcatcgtagggagaaaagcagttctttctgagggggaagactgaatccaagaagcatggctgcagtgagggattgaaggaaatcctgatcaccttgggacaggggctggatctgtcatgttcctgtcgtgcccctggcacatgctgggttccggatatatagctgcaaaatgactgaattaaccaaataatgagtgagactacagatggttcgcgatgagggcaaaattgtattcctggaggaaggatggagtgtgctgaattgaggagcgagtgaggaaatgagcgcaggcaacccaaagggaggtcagtggattatgactcagcagactgagccttgcattctggctcctttatgacttgctgtgagaccttgacttcagcaatgacatcttctgtgcctcatccataaattaagagaacagatctccaagagttccttcaggtatctttcaacctagagttcaattccagaacttcacaatgcttcgccacctggcagtagaagtttcccaaagaattatagccataaaagtatcctctattataattgttatagttgctcatgggattaaggtcttttcttctgtttttaatttttgttttttaagacagggtctcactctgtcacccaggctggagtgcagtggcacgatcatggctcacttcagccttgacttcctgggcccaagtgatcctcccatctcagcctcctgagtagctgggactataggcacgtgccaccatgcccagctacttttgcttataagtaattataattttgtttataattttatttataaacataattagctggacatggtaaagacagggtcttgtgatgttgcccagggtggtctcaaactcctgggctccagtgatcctccagcctaggcctcccagagtgctgggattacaggcatgggccatcgtgccctgccaaggcctttttttcccccttatctgttatcttgaccagcttcctgtgttcctgactgtttacagtcttctcagcatctgggttgagataggtttaaatgaccttaaatgaccacaagacccaagtcaaagtgccaggatttcagtggaatgaaaccaaacaggcatctggaagctgcagtcaaatgatgctggctgtctgcagcagtgtgagccttctctcctcactttccagatgcttcacctctctccccactcccttatttggccatgccataaaaatgggggtaaagaggccaggcacggtggctcacgcctgtaatcccagcactttgggaggccaaggcaggtggatcacctgaggtcaggagttcaagagcagcctgaccaacttggcgaaatcctgtctctactgaaaatacaaaaattagccaggcgtggtggcgggtccctgtagtccccgctctttgggaggctgaggaaggagaatcacttgaacccaggaagcagaggttgcagtgagccaagatcgagctgcactccagcctgggtgacagagcaagactccatcgcaaaaaaaaaaaaaaaaaaaaaaagcggagggtaaaggaatagcacttgctagagaaagagggttttctgtgggggtttattcacatctagggaacagctgggagccatctgatgtcatcaatttagacttcttgctagttggaatgtatgcctgtgttagtccactcaggctgcaataacaaaataccataaactgggtaattcaccaacatcagaaacttatttctcatagttctggaggctgtgaagtcctaaatcgagacactggcagattcagtgcgtggtgagggcccatagacggcaccttctcactgcatcctcacatggtggaaggggcaaggcagctctctgaggcctcttttttatgttattattatttttttttttgagactgagtcttgttctattgcccaggttggagtgcagtagtgcaatctcaacctctgcctcccaggttaagcgattctcctgcttctgcctcccaagtagcggggactacaggcacccaccagcacacccagctaatttctgtatttttaatagagacagagttttgctgggttgtccaggttggtctcaaaatcctgtcctcaagtgatctgcctgcctcagcctcccaaaatgctgggattacacgcatgagccaccatgcccagcctctggggcctcttttataacagcactaatcctattcatgagggctctgccttcctgacctaatcacctcccaaagggctccacctactaataccattattttgggggttatgatttccacatataaatttaggggcacacaaagagtcacaacatagcagtgccttagtccgtgattaaataataatagtaaataaataccaaacaacaataatgaataaatgaaaacaaattaccatgtcaatgagggaaaattagtaagttagatgcctccaaaatattaacccttttttttttttgagacaaagtctcgctctgttgcccaggctggagtgcagtggcgtgatcccaactcaccacaacctccgcctcccaggttcaagcgattctcctgcctcagcctcccaagtagctgagactacaggctcgcgccaccatgcctggctaatttttgtatttttagtagaggtgcggtttcactatgttggccaggctggtctcaaactcctgacctcgtgatccacccacctcagcttcccaaagtgctgggattacaggcgtgagccaccatgcctggccaatattaatacttttaacagatagctgcacccttggataacacttacctttccattctctaagatcctgatgctgctttctgaaactaagtttcattaaataaacttaaggttaaatttaatttcagattagtttttatgctatgtcccaaatgcatataaaattatttaaaagtatacagagactgggagtagtggctcatgcttatagtcccagcacttggggaggctgaagcaggagggtcacttgagccaaggagttcaagaccagcctgggcaacacagggagaccttgtccctacaaaaaaatttaaaaatagccaagcatggcagcacatgcctgtagttccaactacttgggaggctgaggtgagaggattgcttcaactggggagattgagactgcagtgagctgatattgcacagctgcattccagcctgggtgaagtccaagaagcattcgacatgttcctgttccaacaaacagaggcataatattatatgtgtactgacacagtcataacccaaggtaggtgaattggactttcgcagtagaatctagacaggttgagccactgtataattgtctctgtatcaatatggttggaagaaggcacaatgctgaaaagtgccctagccttacagtggtgaagatggcgctggagcggtcagaatgacctcaattgccatagcagcggacgactggactggggatcctaaagcagtgtgctgcaggctgttctttcatggaagcatcagaaactttttaagacatcctgtcttcatccatagttcctcttttaggggccaggaccttatctcatttatcctggtctcccccgtacctactgctgtgtctggcttagaaggcactcaacgaagttgtgtggattgaataaacggaaggagaaattgttcattgagttaaattctgacatttgtattgcagagggaatctcttctcatgtcaccaagttctagaaaagggagaaagtcctagggaagtgtttagaacaagtaaaagagccatggatttgtttttgtggtcttttctttcctttttgagacagggtcttgctctgtctcccaggctggggtgcagtggcgtgatcacagcttgacctcctgggtttaagcaatcctcccatctcatcgtcctgagtagctgggactacaggtgcatgccaaccatccggctaattttcatctctttgtggagacgggaatctcactgtgttgcccaagtttatctcaaactcctggcttcaagcaatcctgtctcagcctcccaaagtgctgggattataagcatgagccaccacacctggcctgccatgaatattttttatgatggtatctaaaaagcacaaacatttagagtattgcttcttgaaatgtgatccaccagccagcagcatctatatctcctgggagcttgcttgaaatgcagaatctcaggccccactacagacctattgaatcagaatctgcaattttataagctctccaggtgtcttctatgcacattaaatgtttgagaaatctttgcctggagtttggccttaggaatgtgatggacccaacatttactaaagggtcttaatccctctgagcttcagtgttctttcctgttaaatggtgattaaagaagacacatatggccaggcatggtggctcatgcctgtaatcctagcactttgggagacaagccaggtggatcgcttgagcgcagaagtttgagaccagcctgggcaacatggtgaaaccccgtctctacaaaaagtacaaaaattaggtggccatgatggtgggcacctatagtcccagctactcaggaggctgaggtggaaggatcacctgagccagggaggtcaaggctgcagtgagctgtgattgagccatttcactccagcttgggtgacagagtgagaccctgtctcaaaaaagcaaaaaacaacaaataacacaggcaaagtgtcttatgtagtaccagacacaaggctctccataaagagtggcgattatgtccatgaatacctctttcagtgccttgaaaggtcacatctctgctgtaggaaggtggctattactctgctctacccatttgtttccaaccaggactgcagtagctgcctcttagaatgcaaagcctgatagaagcatgcctttgctcctttgctgcgtgtcttgtcatatttttcatgatgtaaaggatattgtgctcatgatgtgaaggatattggactatagtttgcacttaggatttgctattttgtataaggcaagaccaccttgcatttcgatgtcagttactcattaaagatgtggatctattccttgagtcaatcacacgttctaatagcttggaatggggagaaaaggccccctttgggctccacaggggaaggcagggctcctacaagctcagggtgtgtttggtatgccgggcagccaaaaagagcaaatgtttacttgagtattcttagttctgagggcagggaaaaactttgggacagacagtttaatatatgggtttgaatcatagctccacatagagctaacgatgcaaactcgagcacattacttaacttctcatagactcaatcttctcatttgcaaatggaggtaataatacgaatcaactcatagggttgttgtcagggttaaatgaaatgataatgtaaaacgctttacatcatgagcagctgtcacaatcataagttagccgtcatgttattcattgatgactttaaccatgtagcataaggtcactggtttttaaatgaatgtatacagtgtgttttacgaagtgctttcacatacattgtcatagttctccagaagactgatactctaaagtctccattttatatataaagcagctgaggttcactggggaccatatttctaacttcctatgggcttctgcaaatctttttggggaaatggccagcatttggtgctagctcccaaatttgtgtttaagtcccagcttggccatgttttgtggaccttaggtgaatccctggcatttgcccttgtttccctttcttagctgtaggataacgatgataatgatgttgttgacaatgatgatgtctagttacatgcttcaaaagctggtggggaaggtcaaggaaaagaatcttattgtatgacgtagactaacctgtgtttaaaatgaactggggatttgttttaatcgggtgtggtaagatgcacagacatggaaataactgtcaggaaagaagttttatactcgtcgatcccgagaagcgggagacatggcatggcacgcgagaccacgcagggaagaaccacggtcattcaggagctgggtgggaaaccatgttcctgagtccttgtgatttttgtgggaaggaataagccaggctgggaaaactaagcaggtttaggattggctcattttaatactttcagcaggctttggagtgtaggagccccaagttgtctggttgccaccctggggtgattagggcagggaaatatctgcttaatgggtaaacacttgggaaaggaggtagttgggggtgtggtctttgggctggttggtttgcttatgaaagatgtgcttgtggggggtcatttgctatctgtaataactggctagccctcgggttggaggagcagtttcccccaagtcagcaaggccccaagtgccagagcatggagaatacagaaaacaagaaaacagagttaatacagcatagatgccagagcccttggtggtgtttggactgtgggacagcaaggcatggattttgctgtcccctactcctttaagacttcatacttatctgattttctcctggtgaacatgtagtgtagaaaaggttcaggtttatctctcacaaggttcatagctcctctccctgctcattgcccatctggctgtctccaccgcacagctttcctcgcgcctcacagactaaattgcatcctaaaggagatgtagtgaggaacatcttctgagcaaatggtgtgctgggcttagtcatttaaaaccttcctgcccttgtgcatgtttaggtaatgtacattatagaaagcgccactgctcctaaatgaacttgggataattggcttgaattgcagaaggcagcaggtctacaattaagcttttgccagatttttgtgtgcattgcaggaaaaattgattaccaaaggttaataatttggcaaatcattcagcagattcctggtgcagaatataggctctgaggactcagggaggaacaggacaggggcagttcttcagatacatgctgttgggagtaaagcaaccatttggcaattagcccagaatgctaaatgttattggacggttaagttcagggggacactgacttctcaaagagctgaggcttgaactgtcttgaaagatgggcgaagtttcacaagaagtttgccaaggaaaggagggcattttaggctaagggactcatccaacccaaaaattattaactgcatgtttctgagaagaatgcctgacatttgagctccctcatctattttttgtttttgtttagttttgttttcattgttttttgtttgttttgttttgttgttggtggtggtgtttttacagagtctcactctgtcacacaggctggagtgcagtggtgctatctcggctcactaccacctgctcctccagggttcaagtgattctcgtgcctcagcacagatgtgcatcaccattcctggctaatttttgtatttttagtagagacagcgttttaccatgttggccaggctggtctcgaactcctgacctcaggtgatccacctgcctcagcctcccaaagtgctgggattacaggcaggagccgccacgcctggcctgagcactcccatctgttaaatggaaatgttatctacttcagaggatgatggtgacgactgaatgcatgaatttgcatacagcatctagagcaatgcctgggacatacaagaaagacctaaaaagcaggaggaaggcaagtgcatgcaggaacaggaagcacataattggaatggctgacacctaagatgtgcacagagcgggggagaatatctggctgcagacgtcgataacaaaagctcccaaagggacctttaagccctacaaagggatccagactttgtctggaagaagctgaaagctattgaaacattttaagcagagaatacccatggggcttacacttaacaaagaccctgcagtattttgtgttagaatctgagcaaagagcatagcagcaggaatacaaagaaagatattttgaggcagaattgttgagtcttggtgacttatgaggaatgagaggggtcaaggatgtctccaaggatttctgccaggaaacttgatgggcagtgggatagagaaagctggtcccaacgtaacctctagttccttctcctagtatggtgttttccaatacgtaccaagatctcagtcagtcagtttcttaacttaatggggtttggccttgaaacaccaattgtagagagtgagacagattagtttgaccgagtttaatttttttttagctgtgctctttagatgtctaatacaagaggaaaatgtgacagctacaaagattaatgcaattgtaggtgacattagcggcacaggaataacaaagttagatgggtaatagtccccaactactttgtagtcaaattgcatagttctagtcttgcacaccgtatattttaagggacatgaacataaaccaattcattgattctagaggagggtgactaggaggatgagaggttttgaaatcacttcacatggccatttgtttcacctggaagaaatggaaaaaaaatatatagggcacagagtgggagaagatattgggtagatgttactagagagtccggtttaggatcacttggaagaagtcatttctatcagagttgctccgcaatgggacaggctgtctcacagagacctggctagaagttcccagaggaggtcgagggggttctgctaagaggctgtagaaccccttcctgcactggctgggaagatagatgaggcagtctctcaagcagtttccagtatgagaggtctgagattctgtgcacatgtgcaaataaacacaaatatttaaaaatctatgtctttgatttgcatattgacttcaatagttttgaacaactgccaagctctgtgctagataacttggaatacggcaataaaaatacctcatctctgcccttagatgttcatagcctagaagggatcatgaattgaagcagtaaatgttatatatgttatgttaatgacattctatttaaacctatatgttaatcaatgttagaattaatataagaaggttggacgcagtggctcacgcctgtaatcccaacactttgggaggccaaggcgggaggatcacctgaggtcaggagtctgagactagcctggccaacatggcaaaactccacctctactaaaaatacaaaaattagctgggtgtggaagcaggcacctgtaattccagctatttgggaggctgaggcaggagaatcgcttgaacccaggaggtagaggttgcagtgaaccgagattgtgccactgcactccagcctgggcaacagagtgagactctgtctcaaaaaaaaaaagaattaatataattaatataagaaacacatagctctccatctctaattgatatctggaagggtcctaagaagcccacagtgtatgccatctaaccttttctgggagaacggactactacttctaaatccaggcacagagccgagtgatggcgggggcagggggatacaagagaacgagtcctgcctttaactaaatttccttgggttgatatttctagtttatacgcaccaaatatagtccatgcataaaaacgacccgccatcctactgggaggctgattttctccagaacacagaatgtggacatttgtgaggtgggcaggggaaaatggaagacaattttcttcttatcttactacggccatatgttctcctttatttccaccggcaagtcttgagccagtcatatgaggggattttagcctgctctggaggactcctacaaacgtccccactaaactgattctactgcagtggccgaggtccttccttgacgcggcgcctggttctgtgtttgtgccactttgctcagccttccagctcctggtggtcagctgctgcccactctcctgtttaaacctggaccgcagacctctcacttttttcctcgcggctgatgtctggttccaggtggtagatctgtcttacgacggtcccataccctaaatccagcatgcctggtggctcagttctgacccagtgcctgtcctaaacattatgttctggacgctattgatctgcctgatccccagggcctctcctttgcctccctgcttcagctccttcaccaggacttgctttctctcaccccacaccttgggaagaactgtcaaagcatggctcctagctgtgagaatttgggggaaaacgagaagggggagtgcacatgcgtgtgtgtgtgtgtgtgtgtgtgtgtgtgtgtatccattttttcatctggaaaaatatgcatgttatcctagtggctccctctattccagcttcaagtctggggtgtccgtgacagcaggtgtggagcccgagaaagagtgtcctccccaggagtcttcccctcccacctgcagcatcaaagctgccctgcgggggtgcagctatgccgcctctcccttgccaggctctttctgcctctgcttcctgtgcctgcggcgagaggtgggggtgatctgccattgcacaggtgctaagctacccagcttttgctccagttccatccaggattatgaaataaacttaaactagactgcccacaccacacaggcacacacatgcacacgcatacaccaggcaggttctacagctaactactcatacacacaatctcttatcacgcagacacctcaacacactacacacacacacagaaaaatacacactcaccatacagtcagcacatacacatcacacatacatgtgggcaacacacacatacacaaacatagccagccatttgccatgcaatcatacacacaggcacacacagatgtgcattcaccatacaggcaggcaccccacacacatatacacccattgacccaaatacaacaatgcaagctccacacataactacctacatacacatacaccatgcaccttgcagacacctcatacatgtcacacgcatagtcatcggagggaaagaaagacttagagaccaagattttcacagacagtgaggaatgtgacccccctggacagaaagagctggggatggctgcttacccacaccatgctcagaagtcattcatattggggcaggggtcagcacagaaaagttagctcctgcctccccagatgcctctcataggcctatgggggcacctagaagtgacgttccatcacatcatcatctttgtccactaagccatagtattttattttattttattttattttattttattttgaggcagattctctctctctctcgcccagtttggagttcagtggcacgatctcggctcactgcagcctccacctcccaggttcaagtgattctcggtcctcagcctcccaagtagctgggattataggcgcatgccaccacgcccagctatttttgtatttttactacagatggggtttcaccatgctggccaggcttgtcctgaactcctgacctcaagtaacctgcctccctcggcttcccaaagtgctgagattataggcatgaaccaccgtgccccgttccactaagccatactctaaatcaccttacttccttccaggtctcccagcttggagtctggcaaattgtaaatactccataatgatccatttccctcctccattccttccagatcacagacctcaaagcctgatgtcctgttggaatcccaggactgctgctactagctttactaccgacctagtgacttaaactctgtctgtgtttcagttttttatttttattttttttcgaaacagaatctcgctctgttgcccaggctggagtgcagtggcgcaacctcggctcactgcaaacttcatctcccaggttcaagtgattcttctgcctcagcctcccgagtagctggaattacaggcatgcaccaccacacccagctaattttgtatttttagtagagatggggtttcaccatgttggccagactggtctcgaactcctgacctcaagtgatcctcccacctcagcctcctaaagtgctgggattacaggcataagccactgtgccctgccactcagttttctttttttgttgttttattttttagagacagggtcctgctctggcatctaggctggcgtgcagtggtgtgatcatagctcactgtaacattgaactcctgggctctaggaatcctcctactttagcctctgagtagctgggactataggtgcacaccaccatgctagctaatttttaaattttttttttttttttctttttgaggcagaatcttgctctgtctcccaggctggagtgcagtggcacaacctccgctcactgcaagctccgcctcccgggttcacgccattcccctgcctcagcctcccgagtagctgggactacaggcgcccgccaccacgcccggctgattttttgtatttttagtagagacggggtttcaccgtgttagccaggatggtctcaatcccctgaccttgtgatccgcctgctcggcctcccaaagtgctgggattacaggcgtgagccaccacgcccggccttaaaatttttttgtagagacagggttctccctatgttgcccaggtaggtcttgaactcctggcctgaagcaattctcccaccttggccttccaaagtgctgggattacaggcatgagctactgcacctggccttgtgtgtcagttttcttatctgtaaaatgaagataataacagaatcttccttatatgaaagttaatatatgagttagcttttgttgtttgctccaactcacaattctggcttttcaagactgctttgaaaccagactttgttgtgtttgtgttagctaatctcccagtttggcatcacctaaaaaccttctgcacattccctggaggtctctgtgagaatcctgcagggattaagagcccttccctctttttctcgtgttgctctgagatgtctgaatccagtagggtggcagcacatttctctcttcctctcttttcccacagcgctgatcccaggctttcgccaagcttcctccttttgaattccatgttctttgccatgtgtcttcctcacagtccgctctgattttcctgctactccattcagctggtcacccaggttagacatccgcagcacataaggcccatctgctgcttcttcagactgcacgcccagccaatgcaaagtcctgtcaaatctgatgctcacccctcccattctccctggagggagctttgctctgtctctggctcaggttatcgtctacctgggctcagcatctaggctctccctgctgagtttagattgtgatcaaatagtaaaaagaaacatattcactgttctacttgctcgaatcaaggctacagatgaaacccccaaaggcagagcttcctccagttcctgggctctgttcagctgcgttgagagcatttactctgtgcatgcaccactgtaactatcacctcacttggttcccagagtgacctcttgtgctaggagctttacccatgcccgttttgcaggtgaggtaactacacagagcttggagaagggccataacttgctcagtgtcatggctaaggtagtggccatggcaggatgcaaatgtgagactgtataattcttgagtcctaaagtcctatcacttatccatcaaggactctcagaaatggccaatccccggcaggaagaatgcatcaaaacagtcctgactgtccttttcagtcctcctgcttcaatcgaactggactttgagattaacttctcccttctctgtgcttctgctcatgccatttggggcacacaccttctttcatcactccgcatctctctcttccttcaaactccacctccaatgccatttgttattcaaagcctttttaatcttctagctagaagggacttttgtcttcataggtctccctggcacttggtacttctgttttgtttttagagatatggtctcgctctgtcacccaggctagggtacagtggcacagtcatagctcacagcagcctccaactcctgggctcaagctatcctcctgcctcggcctccctagtagctgggactacaggtgcaagcctccatgcacagctggtacttcttttcttgtggctttgctactctgccttgcattgtggttacttgtgcacttgccctttgccaccactgcattataagccttatgaagacagggatccaacaacttctttctatcccttgcctggaagagcaccctgcataaaatccaggctgtattcatgtatgttgagttactgcagaaccatttgttgagttgaatgagtgagagcaaggagcagaccacagggcatggagactttccaggttcaccttccttggtgccgttagcaagtctattggaatggttatcagcccaacttcaaccttcttgtccaaagcacagtgtgatagatgttgcaaagcatcctggcacacttttcaaaagagaaagtatttaatacacatctcttgctcttagcggctcaccctggttctcaacaggagccccttttatctctaaggttcaaacaccatctctttaatgatctattctggaattttcctatcatttgctaccaagctatcaatgctattatcaaagctaccaattgttatcaatggcaatttccgaaacatacccttttgaaatttgggacattttcttaacccctaattttctcgctgctcacgttttccttcattctatgatcatgtctggtcctttcatatagatattcacatgaaaaatctcaggcacccttcaaaatgttccctttgggtagtaagaaacagccctccctgtattggaaaggtactgctgagaaaaatcataatttattattatttttatttttaaaaaggctctgattatttgaacagattccttccctgaggactcaccctctgagtgattctgggctgagtccctctctcgattattaatgaatttgagatatggatgtggttgttggtcttgcccataaattatccagtcatgcatgaccacagtcagcagaaaaagaactttccagctcctcagctgctggattcagaaaagtgactgggtcgtgtggacatttctatgagggctccagtttctgaatgttatgagcaacttagtaaaagtgcaaggtaaacataaagtaccattcactgagagcagactaaattatgagccataaccttctcgagatagcctggtaccatttgggttatctcttttataaaacgtgctgagggtgattggtttggaaatagttgttctttcatgtatcttactttattttcctttgactcaaatggttaagatgagaagtggaaataattttctaacaataaattatttcctatctgaattatttttcctgtcaggactttctgttacttcctctgactccaaccatacacacactccccaactcaaacattgcaaatattgtgtttcttaaaatacttgtaattaccttttattattaacttcaatgtacaggtcttgccttcctatttataaactttgattcttcccttaatcagcatgcaatggtttttggttttgttttgttttgtttttaagttttatttttgtaaaagttattgtctgtactataccaacctatgggaacaaatgctattatctttacatttatgtcccaattcacatgaaatctaggcagaaactccaaacttttccaggagtcccctccctaaacatctcttccctatcaatatttgtaattatctcctcttctcctacctgctcttgtctgtcgggagaacccactatcttgtcagcaggactgggctgggctctcattccaccaacaacctcacccaccagtctcaaactccattagccttacctctaaataaacaagcacagaggctgggctggtggctcaagcctgtaatcccagcactttgggaggctgaggcaggtggatcacctgaagtcaggagttccagaccagcctggccaacatggagaaaccccatctctactaaaaatacaaaaacttagcgggttatggtggcacatgcctgtaaacccagttactagggaggctcaggcaggagactcacttgaacccaggaagtggagattgcagtgagctaagattgcaccactgcacttcagcctgggcagcagagtgagatccatctcaaaaagaaaaagaaaaaaaaaaaagagcaagcacagagattaaaaactacgtgttttatgctaacactgcttctaggaaaggtccataggcatggctgtcccagtaacatttctgtgtatgagctcttcccacttgagattctagtgcctcgctgggcacggtggcttacacctgtaatcccagcactctgggaggccaaggcgggcggatcacctgaggttgggagttcgggatctagtgccaacattgctcatcaatctcattcccctatgctggcttctgacagccctgaatctaccttctctctttcttaccctccaagggtcccaagcgtggtaacaatttcaatttatcttcggacaagtgtttgccagaagatctacccgcaaccaggttgaccaagtcaggataatttgagtgcaggtgtccactgggccagggctgcacttctccccagccattgaaagaaggccaggccaggaaaggtggctcacacctgtaatcccagcactttgggaggctgaggcgggtggatcacctgaggtcaggagttcaagactagcctagccaatgtggtgaaatcccatctctgctaaaaaatacaaaaagtagccaggtgtagtagtgcatgcctgtaatctcagctacttgggaggctgaggcagaagaatcacttgaacctgggaggtggaggttgcagtgagattgccccactgcactccagcctgggtgagcaagactgtctcaaaattgaaagagagagagagaggaaggaagggaaggaaggaaggaaaggaaggaaaagcaagcctgatgctgagacagaaccactggtgcaggctcccctcccctctctccccaccctgctgtggggttgtggattgcagggcgggaagcaaagtgtcctttttctatactccagccttgtcacagaagattagtggagaggcagtagaggggatgaggtgtgagtgtggaaggatgaagggaggggtgtgggatccttgtcagggtcctgggccctttcagaaaacttcttgactcctatgaaaattcatgaatctgaggatatactgagggcaaagatgctgtcccactttataggcagcttctggtttttaaatgcaaatgaatattttgggggaggtgtggtgcctatttccacccctttacaatcaagtttgagtcacaagcctgcaagtccagtcaaaacaacatcttggctgggcgtggtggctcatgcctacaatcccagcactttgggaggccaagggaggaggatcacttgaggccacaagttggagaccagcctgggcaacgtagtgagacctcagcattttaaaactagctgggtgtggtggagtacaactgtaatcccagctactctggagactgaggtgggaggactgcttaagcccaggggttagaggctgcagtgagccatgatcgcaccactgggattacaggcgagccaccatgcccagtcaaggattattttctatagcctctaatagaaaaaaaaaaaaaaactattttaaaattctcttcctgcagcctattggccagtggccacaggattctgtttagccaatatatacatatcctgtccagtggtgcaaagtacaaaaaagtgattttgttaggcttttcccacagagggtgtttaatgtcttcttaaaggtgtaagggaattgttcatggtttatttctttgtgaagtttttgattgaattaaaacaccaatataaattggacttaaactgtctaatggcaaattttctataataaacaaaattctaaaatcctagagaacagaaactgtggcttatagttctgcctccactgcacagtacttacttagcttcgtgcatggtaaaaataagggttctgtaagttcatttgttgggtgaatggatttatttattcatgaataaattctttattcatgaaagaacttatttattcactcattacatttcttcctttgtttgcattttacctttcattttgtttattctttggactcaataacacttttcatatcattttcaataagagagttgaataactgtatattgacctgaattgaaaagagaaatggaaacagaaaatctttagcaaattgaactaaaaatctcccagtgagttacaaattaatccagtgaaatgttccggatgttttggatgagggaattctatttcatacaggtcacactcccttaccaacctcaggcctggctgaaggaagattcttctaatccaaaacatcctgcaattttaatttaattatgaaacagcatgttgtgctagctaagttagacttcaagatgacttagcagaaatcccctggtttgataataaatacagatgccatccagtgcaataaaaatgactgcatcaggccagaggcaggtacaaaaaagctgaaagaggcttttatttattgtgatgccagaggcaataaaattgtgtatcatttggggtgaaacttttaatttcatatcttgtaggtattaaactacacttgctatctgcacatccaagtaaatcgtctcccatctttactccctgtctttactttcacaaaaatcttaattctgggttctgccaacgctgctttcttacctattccttgtctgttccttgtctccacaaatctcccaacccctttcccatatctactctcctattccaccccacttttctctaaggaactccaggaagcagaggtgaaacccctgtccaagaatattcaaatatgtatttattccttcatgcaacaaaaatcagcctagcatggtgactcactcttgtaatctcagcactttgagaggctgaggcaggaggattgcttaaggccaggagttcaagaccagcttgggcaacataataagacgcctgtctccacaaaaaattaaaaaaaaaattagctggtcatgatggagcacagcttagtctcagttacttaagaggttgagatgggaggattgcttgagcctaggaattcaaggctgcagtgaactgtcatcatgccactacactccagcttgtgctacagagggagaccctgcacaaaacgaaacaaaacaaaatgaaacaaaaacaaaatgaaaacattcattaggcatctcctatgcataaggcattttgctttgtttgtaaagacagatcacaaaaaagcaagttattttgtctattctccaagggagatttaaatttgcaggcaggattgaagcagaatgagaaataggaaaaagatggagctgatatgtacaaatatgtaagacagatggagtctctgccaggctgtaaatagcataggtcctaaaccaaactcatcatgttcctctgcaaaagcacttcctcccacagccttcctgttgcgtctcggtcccgcaagtgttcctgtgatccagaagcattttattgcacccatcttctggtcacctctgttgttgtgtatgcatttgcttgtttctttagcaggactatgtcttaaccctggcatatggaggcagatccaattcctagtccatccacatctctggagattattccagttttcagcattaataagttactaaaaaaaaattgttgagttaaattatgttcttaccattgcacaagcttacaaaatctgcttcagatcaaacagccatcttctacattgcagagtttgtttcgtatgcaaatggatcctctttcgttgagaagccaggtgtgtagaaactcagggaggaccaaagcaaggtgctggggctctgtgttctgtgcagtcttgggaactgacagagcagttgtggttatctgtttgaccttgtacttggtgaatcacatactgatgtagggggattccctgttgctaccactatttgttccattctctagtttcctactcgagtttcagatactctgcaactagaaatgaccttagttcttcccagttatcagatattattttctgaccctcagtttcgctggggatgccactagcctggcatatgaatggttttcaaataagaatctcttccaaacagaagaggcagcctgggtatatagtgatggtttctgccctttttctagggtgtactctcttgaagaccctctaggaagccaaaactgcactgggcatatctgcagcaatctctgtcatctcattagggtatgttgaaaataagtcaacctgtgagttagctattgtcagaaaattgctatgtaaccaacaaccacagatcctcatggtcaacaacaataatgaacattcatttcttgtacctgtgaagttcagctaatctaggctggactttgctgatctcaactggactcaacttatgcacctggggtctaatgggggttggctgaccttagatgaggttggctggggtgacttggttctgctctacctgtctacctcctagaacagtaggcttgcctgagcatatacttttcatggcaaaaacacagcaaaacaagctcaattacatgagtggttgtgtagacctctgattgtatcatgtctatgacatcccattggtcaaagcaagtcatatggccaaacacagagtcaagaggtagagaaatagcctccgtgtttttgttgttcttgttgttttgttttttgagacaaagtgttgctctgtgacccaggctggagtgcagtggtgatcatggctgtattagttcattttcacattgctataaggaaatacttgagactgggtaatttataaaggaaagaggtttaatcaactcatgcttctgcatggctggaaaggcctcaggaaacttacagtcatggtggaaggtgaaggggaagcaagccaccttcttcacaggcagcaggaaggagaagtgatgagtgaagggggaagaacctcttataaaactatcagatcttgtgaaaactcactattaccagaagagcatgggggaaactgctcccatgattcaattacctccacctggtctctcccttgacacacagggattatggggattatggggatcacaattcaagatgagattttgggtggggacacagccaaaccacatcattctgccccagcccctcccaaatctcatgtcctcacatttcaaaacataatcatgcctttccaattgtcccccaaattcttaactcattccagtattaacccaaaagtccaaatccaaagtctcatctgaaacaagtcaagtaccttccacctatgagcctgtaaaatcaaaagcaagttagttacttctgagatgcaatgggagtacagcactgggtaaatacacctgttacaaatgggagaaattggccaaaacaaaggggctacagaccccatgcaagtccaaattcagtggggcagtcattaaatcttagagctccaaaatatctcctttgacgccatgtcctacatccaggtcacactgatgcaagaggtggtctcccatggccttggacagctctgttcctgtggcattgcagggtacaaccccactcctggctgctttcacaggctggcgttgagtgtctgcaacttttccaggtgcatggtgtaagccgtcagtagatctaccattatggggtctggaggacagtggccctcttctcacagctccactaggctatgccctagtagggactctgtgtgggggctctgaccccacctttcccttccacactaccctaccagaggttctccatgagggctccacccctgccacaaacttcttcctggacatctgggcatttccatacatcctctgaaatctaggcagaggttctcaaacctcaattattaacttctgtgcacctgaaggcccaacacaatgtgtaaactgccaaggcttgggacttgcaccctctgaaacaatggtctgcgctgtacattggcccattttagccatggctaggatgcagggcaccaagtcctgagactggacaaagtagcaagaccctggatctggcccatgaaaccagtttttcctcctaggcctccaggcctgtgatggaaggggcagccatgaagacctctgacatgccctggagacatcttctccattgtcttggtgactaacatttggttcctcattacttatgcaaatttttccagcctgcttgaatttctccccagaaaatggggttttcttttatattgcattgtcaggctgcaaattttctaaactttatgctctgcttcccatttaaatataagttacaattccaaatcatctctttgtgaatgcatacaactgaatgctttcaagagcacccaagttacctcttgaacactttgcttcttagaaatttcttctgccagataccctaaatcatctctctcaagttcaaatttccacagatctctagggcaggggcaaagtgcttccagtctctttgctaaagcacagcaagagtcacctttattccagttcccaaaaagatcctcatctccatctgagaccacctcagcctggacttcattgtcaatatcactatcagtattttggtcaaagtcattcaacaagtctctagaaactttcaaacttttccacatcttcctgtcttcttttgaaccttccaaactcttccaacctctgcctgttacccagttccaaagttgcttccacatttacaggtatctttatagcagcaacatactctctgtggtaccaattgactgtattagtccattctcacattgctataaggaaatacctgagactgggtaatttataaagggaagatgtttaattgactcatggttcctgtggctgggaaggcctcagcaaacttacaatcatggtagaaggcgaaaaagccaccttcttcacatggcaaaaaggaaagagccccttataaaaccattagatctcatgaaaactcactcaatgccacaagaacagcgtggggaaaaccacccccatgattcaattatctctacctgatctttgccgtgacatgtgaagattttacgaggattatggggattacaattcaagatgagatattgggtgaggacacagccaaaccatatcaatggctcactgcagcctcaacctcctgggttcaagcaatcctcccacctgagcctctctcctctggagtagctgtgattacaggcacataccaccgcactcagctaaaattttaatttttagctgggtgcggtggctcacacctgtaatctcagcattttgggaggctgaggccggcggattgcctgaggtcaggggttcaaaaccagtctggccaacatggtgaaaccccatctctactaaaaatacaaaaaagttagctggatgtgggtggtgcacacctgtaatcccagctactccagaggctgaggcaggggaattgcttgaatcagggaggtggaggttgcagtgagccgagatcagctcactgcactccagcctgggtgacacagcgagactctgtctcaaaagaagaaaaaattattttttagagacacagtctccctatgttgcccaggccggtctcaaactccaaagcaatcctcccacctcagcctcctaaagtgctgggattacagatgtgagccaccatgcccagccttgcattctgtgttcttaaataatagtgtgaccttgagtggagctcagctagaacactctagtacttctactccaccccattctattgctctttgatttctatccctcataatggagtcattcaggagaggaaagaacagatacttcttgaggcctttatttatgctaaaagtcactttacctttttcctttgcctttgattcctgttcactcctgtcctcaagttatttgactttttttgttctatggtggtgtctccagcatcctactttagagaaagaagttattggtctttcccctgtcctataccagaccccattttcattagcatgactgttttcctgacctcgtcatgatttgtgaatcccagagttcccttggagaactgaattattccaggaaaacaactttgagataaaacaacttcagcttcctcaaccaaattcctgatgacagttctgctttataaatcaaagctaccacttgatcccacaagtgcaaatgctttacctgtgcacttctgtgagacacagaacagcagaacttgttcttaatgaaacacttgatcatgcacagtggctcatgcctgtaatcctaatactttgggaggccaatgcaggaagatcacttgaggctaggagttcaagaccaacctgggcaacatagcaagaccccatgtctacaaaaagtaaaaaaaaaaaattagccaagcacaatggtgccatctgtagttccagctcctcaggaggctgaggtgggaagatcacttgagcccaggaggtgaaagctgcagtgagttatgacagtgccattgcactccagcctgggtggcagagtgagaccctgtctcaaaaataaaaataaacactttacatgcagtagtacttaaaccctattgaagaattttgttgggtaaagcctgtaaaatccagctgtaatacctcactgagtcctgcattaattaatcataattaataataaataactcatgagttaacgatggtcatttgtatttgtatgaattatgattttacctttttaaacattgcctttcaatactacattgctaaatcacattcagattataatctttatagccacttttacttattttgttcattctgcctgtaaggaaagttatttaaatttattaaaaccaatattgacttcatgtcatcattctgtaaacatttttcagaagtaaataactttcataaggacaaagacttgggtatcaaaggaagccaagaggcccagaataaacatgtgggcaggacctagggtgggcacagccctatcacacggttccctttacaagggtggttgggagtctctcagatgctggaagtgaggaaaaaggagtcagggcctggggaccacttggcagaggagttagtttttaggccagaacacacaaacctgtttgaggcattaagtatttggagaagaagacaaaaaacagaaatggtagccaagttccacctcattctaaataacagctgagttttaggtagaaaaaaggaaaggaagaatttataaagggaactggaagcaaccagaaatggggaaaatataaacgactcaaaagatactgtgatgctataattccactactaacagtccagtttctgcaaggttcttatctgattggaagaagaaaaacaatctacgggctcagggatacaaaagagtaatgcctaatttatgccttgttcccctaatcagtggctgtaagctgcttgccaaggactgaggccttcagagcctttgtgtttgctatgttggtgcttctgaaatgtttctcatgtaaatccttgtcgacagggcaagccctctaaccagggacccacatctctctataataatatccttaaggttttctctccattgttttgcccataagagcatttgagtttgactcttaactatcaatatctaactatctacctatctatcatctatctatctatacacatatatatgtatgtatatatatttctgtatatatacatatagttgagtcaaaagtgcaaatgcttaatatatatatatatatatatatatatatatatatatatatttgccttttttttttttttttttttgagacagagtctccctcctttacccagactggagttaagtagcatgatcatggctcactgtagcctgggcctcctgggctcaggtgatcctcccacctgagccttttgagtggctgggtctacaggcatgtgccaccacatctggctaatttttgtattttttgtagagatgggttttcgccatgctgctcaggctggtcttgaactcctggaatcaagcaatactcccacttcaggctcccaaagtgctggaattacaggcatgagccactgagcctggccttaactatactttaaagcaggttttgaaactacttacacaggtttagccatgtgacactatttacagcagtcagtcagaactgaaggaagttcactctctgcctccacatggacaacatcatctcttggcagtgacccaatacacaggctaaggacttgcctctttttgtctttggacaaaaagagttgtccaaaccctcttttttggacaactcagctagggctatcatttctttgtgccatttatgggtttatctgaaatacacagctgctgaaattgtctgaattaaatttcactctgtgatcaaacttttctttcattttcaaggttattggagcaagtttattcattacacaaggacattagtcatttttaacttggtattatgaagctgtctaatctaacatttatgtatacaactggcaagcctaatagtcccaagacagacccatgattttttttaaatatatatatatatatttattatattttaagttctagggtacatgtgcacaacgtgcaggtttgttacatatgtatacatgtgccatgctggtgtgctgcacccattaactcgtcatttacattaggtttatctcctaatgctatccctcccgccttcccccaccccacaacaggccccggtgtgtgatgctccccttccttgtccaagtgttctcattgttcaattcccacctatgagtgagaacatgcggtgtttggttttttgtccttgcgatagtttgctgagaatgatggtttccagcttcatccatgtccctaaaaaggacatgaactcatcattttttatagctgcatagtattccatggtgtatatgtgccacactttcttaatccagtctatgattgttggacatttgggttggttccaagtctttgctattgtgagtagtgccgcaataaacatacatgtgcatgtgtctttatagcagcatgattgatattcctttggtgtatacccagtaatgggatggctggagacccgtgatttttatggtcttggatgttgttcatgatgacaagggtgtacatgtcccagacgccatgctgcagtgctgcacatttcaaagatactgtgtttttgcttttttttttgagacagggcctcactctgtcacccaggctagagtgcagtggcgtgatcttggctcagtgcaacctctgcctcccaggctcaagtgatcctcccgcctcagcctcccaagtagctggaattacaggtgtgcagcacatggctaatttttgtattttttgtagagatgatgtttcaccatgttgcccaggctggtctcaaactcctgacctcaagtcatccgcctaccttggcctcccaaagtgctagggtaacaggttgtattagtccattttcacactgctgataaaggcatacctgagactgggaagaaaataaatttaatggactcacagttctacgtgactggggaggcctcacaatcatggcagaaggcaaaagacacttttgccttttggtggcagaaagagagaatgaggcagaagcgaaagtagaagccccttattaaaccatcagatcttgtgagacctattcacaaccattaaaacagtatggggaaaaccgcccccatgattcaattatctcccactgggtccctcccacaacacgtgggaattatggcagtacaattcaacttgagatttgggtggggacacagagccaaaccatatcacaggtgtaccatgccccgctgatactgtgttttaaaaccctcacttatggtagtagaattattatcttaactttagagatgaaacaataagcaaaatgctgagactttaaggttaagtaatttgcttacaatcacacagccaggaaagttaagtttaagtctagagtacttgccctaaaactccaagccattcactacaaaaatactcactggccacctggcaggtgaataaccatgccagcggcaaaggagaaatacacacacttcctatcatttaagagttttcattctacactcctcttagatcttggataagtcattcatgctggcattgtttatgataaaagtagatttacaaagattttctccactagattcaaaaagatatcttttcctgtggcaatctctgagatccattcaccttcgatactcagagtctttcttcgctactgtcatctcattatgtttagagatcctctagaataggtgctgtttatctgggagttaatgaacttggattttgtcaaatgtattttctgtgtctactgagatgattgtgtgattttctgtttattctatcaatataatgtattccattaattgattttctaatattaaaccaacctggaatccctgagataaatcccatttagtcatggtgtatgtttatgtttatttatttattttactattttaaaaatatttttatgttatatatattttaccactatttatttactttactattaaaaatagtggtaaaatatatataacataaaatttgccatttgaaccattttcaagtgtaaaattctttttatatgtgtctggattcggtttgctattactttattgaggattttactattcactaaaatgtggatattagtctgtagttttctttttctttcttttttttgatgttgttgtctgcttttggtgttggggtaatattggtctcataaaatggattgagaagtgtttcctctcttctattttttggaagcgcttgtctgatgtgttgggtagagcttgatgatgataggctttgactgttaaagtgaggctgcctggctttataacaaggcagtgagaacccattggagcttgaaccagagaatgtgcatttcagtaataattttgaaataataatttaacaaatcactacatgtaaatatatatgacaaagtaaatgggaaccctcctcatgagataaaggagaactgaaatcatatagtttaggaagcaaatgaaaaaaaaatcatacagcttaggaggcaagtggaaatatatctgtaatagacaagaaaggaataacttgtcattgatgccttaaaaatataagtttaacgtcaaggtaggcaaaaaaaataaagcatttacttgtaaaaattttagtatagaaataatgtacaaaagtagagaaaatagtataataatcccccatattctgatcttgtattcttcaacaattatcaacacatgaccagttttgtttcctctataccccctctacttttttttttttttttttgagacagagtctcgctctgtctcccaggctggagtgcagtggcatgatctcggctcactgcaagctccatctccttggttcatgccattctcctgcctcagcctcccgagtagctaggactacaggcgcctgccaccatgcccgttttttttttttgtatttttagcagagatggggtttcaccatgttagccaggatggttttgatctcctgacttcatgatctgcccacctcagcctcccaaagtgctgggattacaggtgtgagccaccgcgcccagccaccccctctacttttaacccatactcctactcttgatgaattattttgaagcagattccagatactgaaattattttattcataaatattccagtatatatctctaaaatttaaggacttttaaaagcatagccctgtaaatgtcattgcatccaaaaaaaatcaacaatatttccataacatcatcaagtatccaggaaatgttccaaatatccctgatagtctcatactttttttaaaacttggtttgttcaaataggaatccaaactaaggctcttccattgcatttggtgaatatgccttttaaatatcttttaatctataaattacccctccctctattgttttttttggggggggcaatttatttgttgatgagtaatactttctgttggcctataaaatgtcctatactctgctttttgttgattttatccctgtggaggtgtggcttagccaagtttctccagagaaacagaatcaatagaagaaagagagagaaagaaggatttattacaaagaattgggtcacataattatggaggcaaacaggtcccaagatctgcagccaaccacctggagccccaagagagtgtaatctgaaaaactgagaaacagcagagctgatggtgtggttcagtccacaggccagcaggctcaaaactcaggaagagctgatgtttcagttctggttcaaagacaggaaaaacgttgatgctccctctggaaggctgtcagatgggaagaattctctcttagttagggtgggtcaacctttttgttctattcaggccttcaactgtaggatgaggtctacaatgatccaaaaagggaggaatctgctttacttagtctaccaatttaaatattaatctcatctaaaaacgccctcacagaaacatccagaataatgtctgaccaaatatctgggcacaccatggcccagtcaagttgacacacaaaatttactatcctagagtgtatttcctataagtttgtagttagtagttaggtcctgattagattctggattcttcctgtttttgtttgtttgtttgtttgtttgtttgttttggtaattgtcttacctctggccaataggctctggttcctaagtctttttggcatgcttttaccgtctttgacagtttctttgctggctgatatgacaagatgttccaaacttatccctgatgttgaatcgaccatttctccaaagaaccctgttcactttaaccagaaatggtatttagagtgcattaggccaggccagatatgtggctcatgcctttaatcccaacactttgggaggctgaggtgggcagattgcttgaggtcacgagtttgaggccagcctggctaacatggtgaaaccccatctctactaaaaatacaaaaattagccaggtatggtggcatacacttgtaatcccagctacttgggaggttgaggtgggaggatcatttgaaccccagaggtggaggtttcagtgagccaagatcacgccactgcactccaccctgggtgacagagtgagaccctgtctcaaaaaaaaaaatgaagaaagaaaacggcctgggtgctaaggacacacttagctactcttagtcaaggtatctaggccttttcaacagacagagctaagaatagtgtattttaccataaaacacatcatgtgttcttattaatatttccaattcaaacttaggatagaaggtttttatttaacttctttgatttgatatttatatttttcttgcactgaaaaccttagctcctaatgaaataatgtaatttatttttctactaaatacattatgatttcataataatcataccttactatcagaaaatatcatatcagagaaaaaattattctaaaaagagaattatggaaaaccacttcagatttctttacagttttttggttttgttttctgtttcttttttttttttttcttcctctggcatttaccccactaggattatgtggtctcatgactgtagtttaaaaatagaatcattaaaaaagtctagattcagctgacatccaggtattttagccaactatgaaggcagaaatgatgtgccatggagagattatgatctgagtgatgtagccaactattaacctaagtttctgcgaattcaggggatgtggacagctatattccatatttaacttcaccttctatatttagtaggagcacattgttgctactgatcagttattcaatgggatgagagttaaattcactcatgaagcttttgtctttaggaggaaaatgtaaagttttagagccacagagggttacagtggtactgaaccttgaaggccacctggtttaatcaccgtagtctacagaggaggaaactaagatccagcagtgtctagcaacttacctaagatctcaccactagttagtagcagggatagaactggaaaataatctgctgtctcctttccattgatctgtgctgttcccttgctctccttgtgtaaatgctgaagcggatcatcatgagcccaggatgagcaagggaggcccgttctgaaagttcaatctcaagactgaacacactcaaaaaatgcttatgagacatttggtgggctatttggtaaatattgagtaattggctctaagtatataacaagacaggctttattgtctttttaattttttacttgcccaggtgataaattgaatatgtatctggtatgatctgaaagctggagacactatgtcaaacatttaagacaatcttctcaccgtattctatttttaaaacaatacaacagtacttgaaaataatttctaaagtctcgattataaatgttgtctgtgttcatgtatctcattcaataaaccaccactacatacaatgtactgggctacatggactttttcaacaactagaaccctgcaaatatggaactaggctgccccataagttagtgaagtggagaactgacaactagtggattagtgaattcttaccagaaatatgcacagggaattcctacagaggtcaaaggatgggacttgatgacatctggtgtccttgtcctttctaatcctaagattagattgtttttgttttgttgttttgttttagagagtcttgctatgttaactaggctggacttgaaccttgaactcctgggctcaaaggacctcccacctcagccttccaagcagctggaaccataggtgcgcaccatcatggctggctggatgagagacctgtattctataatttgtgtgatgcccctattaaagtagcttgtttggggagcgagtagtaaccatttacacaaagagatacaacatgttcttctctcccctttttcttctaagtcaaagttcagtctctatttacagccaacccccgaaggctcaacatatcagagaataaggcatagtgagcccttagggaaagtctccatggaactctcatcttagggacccctcttcacgaatgaaaagacatgctttgcgggaatcacagcaacttcctgctggccgtgcacgtcctgcctatttctgttctcttctctccagctgtcttccatttcaatcacacacttgtctctgttactgataccccctcccactccgggtttattagtagctacgttctcagcccaacggtgaaagagaagcaagtggacaattttgggacctggaaagttattcatccacagccgacgtgctggttcacgttaacgccagccaacaaatgcatgagcccctactgcgggcccggctctgagataggtgctggggaaagtgaaggagacacagttcctgctcttccaggctagagggggaaaggagacgagaaaggagaggttacaggaaagcccgagagcatgagcacggaaaagggtaaagtcctagcctcacagaggattagaagccactctgagccaaatgatttcactgtgacctgaaggaaaaggggaggagaatttccaggcaggggaaagacagatccaaaggtccagaacaacgggagttcagggaattcaaggaactgaaagagtaaggcatgttggagtgactgtctcgagatgactcaagcgaggaaggcaggagttagaccaccagtggaggggcttgtcacagaactccaagaagtgctcaccagaacttcagctctgacttatggatatatatgtgtgtgtgtgtgtatatatataacatacacacacatgtatatatacacacacacatatacacacacacacacacacacacatatatatatatatttttttttttttttttgagatggagtcttgctctgtcgcccaggctggagggcagtggtgtgatcttcgctcactgcaacctccacctccagggttcaagtgattctcctgcctcagcctcctaaatagctgggattacagtcgctcaccaccacacctggctaattttgtatttttagtaaagacagggtttcaccatgttggccaggctggcctcgaactcctgacatcaggtgatccaccctcattggcctcccaaagtgttgggattacaggcatgagccactgcacctaaccttttttttctcttttaaacagagacagagtctcactcttgtcaccagcctggagtgcaggggcgccatcacagctcactgcagcctcagcctctggggctcaatcatcatggctcactgcagcctcagtcttcccgcctcagcctcccaagtagctgggactacaaggcgcatgccaccacactcagctatttttttttttttttttttttttggtagagatagagtctgctttattgcccaggctggtctcgaactcctgcagtcaagcgatcctccagcctcagcctctcaaagtgttgggactacaggtgtcagccactgtgcccagcctatggatatattcttcagtgctgaagaaattatttcccagcctgttaaatggcttctcagttttgctttgagtaatcaaaaaccactatttgctgagcacactctagaagcagatatggtagtactaggccatgggagaaaatccagtgatagcaagcagccctcccactacagagctcataaaatgaggttctttctttttcaaactccagatactgataacaaatacattcaaaaaccaacagacaaaaaataaaaggctaaaagaaactcatcatcaactcctttagaccaaattttaaaatatagtgcgataggccagacacagtggctcacatctgtaattccagcactttgggaggccgaggtgggtagatcacttgaggtcaggagtttgagaccagtgtgtccaacatggctctacttaaaatacaaaattagccgggtgtggtagtgtgtgcctgtaatcccaggtacttgggaagctaaggcaggagaattgcttaaacccaggaggcagaggttgcagtgagccaagatcacaccactgcactccagcctgggcaacagagcgagactccgtctcaaaaaaaaaaaaaaaaatagagtgggatacttgtcactacaggtaaaacagaaactctaaggcaaaagggagctgattcccgtagcaaaatgtttttaatttgagagtgtgggatgagaaacccggttctatgaccacagagttccacttggatgtcccaaccatggctcctagaatcaggtgctctctgtcctggtgcagtggctcacacctgtaatccccgcactttgggaggctgaggcaggatgattgtttgagcccaggaggtcaagagcagcctgggcaacacagggagacttgtcagtacaaataatttaaaaattagttgggtgtggtggcatgcacctgtggtcccagctactcaacaggctgaggtagaaggattgtttaagcccaggagtttgaggctgcagtgagctacgatcgtaccacagcacttcaagctgggtgacagagtgaaaacctatctcaaaaaaaaaaaaaaaaaaaaggagagagagagagaatcaagggtctctctttgggcattgggttcctccctagaacttccgtgtgtattactaacaacacaattgagagcactaggaaaaatagctaatgcatgctgagcttaagacctaggtgatgggttaatagatgcaacaaaccaccatggcacacatttacctgtgtaacaaacctacacatcctgcacatgtaccccagaactaaaaattaaaattaaaaaagaaataacatggtctaacaagggctgaggaagagatgcgcctcgggtgcctcaggcagcctgcatgccaagtgatgaggatggggggccagggaacagctccgccctcggccgctcaccaccccaggatccttcagtctaggctgagtagtaatagcaaatcccattcacatcatatttcattaggctctcacgtgccttattcagctgacctctaatgagagcatgcatgagaatcacccagaagggctacgggaaccgagggctgaggaccgggtgccgtccccagagctctgactcggcaggtcagggcgggactgagaattgcatttctcacaggttcctgggccctgctatgctgctggttcagggaccacatctggagaatcaccggtgaactcatttcacagaaaaccttcaaaggccagctctgccgccaggctgttaagcttcggagggaacaaacccctgccctgaaggggctcgcccacagtgaaggaaacagaaataaaaaataaagtattagaatgtaatgcaatagaacagcggtccccaacctttttggcaccagggaccggtttcgtggaagacagtttttccacggacgggggtcgcagggtagtttcaggatgattcaaatgcattatatttattgtgcaggttatttgtattatgattacattgcaatatataatgaaataattatacaactcaccataacgtagaatcagtgggagccctgagcttgttttactgaaactagacggtcccatctgggggtgatgggagacagtgacagatcatcaagagtgacagatcatcaggcattagattctgataaggaggagggaacccagatccctcgtatgtgcagtttgcaatagggttcgtgctcctatgagaatctaatgcccagctgatctgacaggaggcggagctcaggtggtgatgtgagccatggggagcagctgcagatacagatgaagcttcactcacctgcctgccactcacctcctgctgtacggcctagttcctaacaggccacagactggtaccagcccatggcccaggggttggggacccctgcaataaaacaaagtctcaaatggaggttagaggaggctgctatgagcacagagcggagaaataggcccacctcagtcagggaagataagaacaggttagccacggcttctagcagggaagagagtaagagaacaaatccaagaagaagctgtgtattcagaaacagcagggaggcctgcaagggcaatggccctgtctcagtgaaactggggaggaaacccatatgtagaaacggatggggagaagagaatggaaaaggcaagtagagattgataagtgctccaaggaggagagagacctggtaagatctgccttttgggaagctcattccagggggtagggtggaggaagatgggggtggggcaggcgtggagccaggctggaggaggctgttctgtgctgcaggtgccagagggaggcttgagcccagaagaggcggtgggtggagggcctgagcctaatgggatctcagggatctgccagtatacgtctcacatcttggtggagaggagggttcaaaacttgcaggtctcttgtgttttggcttcacagacagagtgaattggctcctctctgctaaggagtcaaggacacacatgctggtgccacacagaggaggaaacctataagccaggaagtaggagcacacacccagtgctgtcccacaactcggatcagaggatcagacggcagcagctccctgccagggattaagagcccacccctgccccctgctgcctgctcccttgcactctacatatttgtagggatggggtcaggggacatccctgtgattatggaagctccctggttgggagaaataaccttggttcaaaaggggagcacctggtccccagagactgtaaccagcccggcctcctggggacctgggcagatctgctgagcctgatctccgctaagttcaagagaggggagatgaggctctgcaaccaccatcagatgccccagccaattctcggagacagagagagccaggagttttgccagcccacctcagctgtgctgactgagcactggccaccagtgggcttctctgctgctccccaagggagggaagtggccagcagggtttgaaagagtttcagtgctgtttgccccaatggcctctgggcccctggtgagggtgactggcttggagctccaggaaggtggcaagggctccattcccacctcatcctccagctgcctttctctgggtggcgtctcagtgaagccagcctggggtctatcctcatgtgctctcatgatcccaagcccacctgcatgggtcgagggtccctgcatctctctctctctctctgtctctctctgtccctctctctccctctttccctctctctctctctctccctcaccctctctccctgtcgggacttgagcaccatggctctgctgtgatgagcaccatggctctgctgtgatgtgacttatgattgatgctgcccctgagcgtgctgggtggtcttctatgcttgtcacaaatctctgccatctaattccacccccatcgcccagattgcttccttccgtgtgccactccccttctgggcacttgtggtgataggacatatgaggggaggagctggtttgggaggcgcaaaggcatgataaactcgattttgaatgtgtcaaatatgacttacaggcaggttgacaggatagagatggattgtcggcatttggttagacgtgtgtggagctcaagaggggagcctgagctggtgtcttagtctgttcaggctgctataacaaaatgccttagatcgggtaactcatagacaacagaaatgtatttcccacggttctggagggtgggaagtaagtccaaggtcaaggtgctgatggatttggtgtccggtgagggctgctttctgattcacaggtgagtcttctctctgtgtcctcacgtggtggcagaagtgaggcagctctccggagccttctgtataagggcactaatcccattaatgggggctccaccctcaagatctaatcacctcccgaaggccccacctcccaacgccatcaccttgggcatttggatttcaacgtgtgaattttggagggacacagatattcagaccatagcagctgtgggtgaagattcaaagactcagaaacagatgggacctcccaggcagtgtgtgaagggcaaggctggaaccctgaacaccagtgacaagtaggagatggagagagaaaggaggatgctaccatgtggatgaaaaggggctttaacacatattgctcaggtggcctcactatgaaataacaggacagatgaagtcactgagtctcgggggcaccttcacaatctctcacagctgttagtggcagagccaggtctccaagttcagaatttttctccctacatttgttcacttattcattcaacagtcactgattgtgctcttttctgtgtgtgtacagggtcttgtgttcataccatgagcagcatagcagggacccaagcaagactgggaggagaggcgggatgcagacaagttgggaaccagccacgcctctcctcctagcaggggagttgctctaataggttttaattttattcagctttggtgaggccaatagatcagatgatgactctcactgaagagagagtttcttactctcagatctaagagaagtgggcacgccacgccatgcagggacacccggggcagcacgagggctggtcaagaggcagagggagaagagaacgtggccagagcccttattatggtttccacaggaaagagtgggcaaggcagggttagctagctcaggactggctagtttaaatcatttcagcaggctctggggcatacaggctgttcctatttgtcagatacctggtcctgggtgattagggcagggggatagtggcctggagtgtgagagccagataagggaattggttgggatgcgagctctgggttggttttcatttgaaaagcatatcacccggaggactccttccagggggagggggacagtgagggagacatattattgggttgcacagagcaaggtgtgtcctgcagatgcacgcggggcagatgttaaagcatcaggtttacagaaaggagaaacatggttaatacagaagcagaaaaggaatgcaaaacagagaacaactgcaaaggtgcacatgcggaaacacaggttgatgtcctgccaaccctactgtggatggtctgtggaccagcagcacctgggacttagagaggcagcgtctcaacccctcaccccagactgaacgaatctgaatctgcaacaccctcaggtaacccatatgtatcttaagccatgataagtactggcatcagctgcagacaggcccgtggacagatggaggaggaggaggaaaacgtgtggttcgttagggaggcttcttggaggagtcctctaacaatgaaagccagctttcatgtgaaaagaaatgagatcttttgcctaaaacagtggttctcaaaattggctgcaaattggaatcacctgttgtgttttaaaaagctctggaggccaggcacagtggctcatgcctataattccagcactttgggaggctgaggctggcagatcacttgagtcagaagttcaagaccagcctggccaacatggcaaaacaccatatcaactaaaatagaaaaaaaaaatagctggacatggtggtgcatgcctgtagtcccagctacttgggaggctgaggcatgagaatcgcttgagcccagggagctgaggttgcagtgagccaagatcgcaccactgcactccagcctggacaacagagtgagactctgtctcaaaaataaataagcaagtaaataaataaatataaaaagcactgatccctgcttccaaacactggagattcagatttaattgagataaggccaggatgtagagcgtttacagaactccccaggtgatttaaacatacagccatgttagagaaccactggcctttgccatacggaagatataatgtgctgtaccaggaccagagaacagagaaacagaggaatcagatggtttgagagcaagaccaggagtgtgcaggtctgcccggtgggtggggtgaacagggagggtgcgcctaggatccttctcccctcccatccccatttggcttcctgggccacgttcctcagcgcttcgttggttcttacccggatgcttgtattctgcttccccctagtggtgacttgcagtatggcacagctgtcgctggcggtttcattaaggttccgcgttcatcactaacttgtgacagtgagttacagcctgtggtctcgacaggtgggatcatcctaagaatcatgtcctgtgagcatcttcgccatgtgacttcaggagttgctccctcacaaggagcctcagggagttataggtcactggccaagcactgccctggcacagggctgcaactgcagcctaagtggcttcctgtgcgtaaggtttaaggaactttcattttattagccagtggttaagtgcctgtgagagcaatcatcagcaggtgcagtggtagaagataacaagcttcctaataaatagtggccaccggccgggtgcagtggctcatgcctgtaatcccagcactttgggaggccgaggcaggcagatcacgaggtcaggagttcaagaacagcctggtcaacatggtgaaaccgtatctctactaaaaatataaaaattagccgggtgtggtggcgggtgcctgtaatcccaactacttgggaggctgaggcagggaaaattgcttgaacctgggaggcagaggttgcagtgacctgagatcacaccactgcactccagtctgggtgacagagcaagactccatctcggggggaaaaaaagtggccaccacttaaatctttgtagcaagaatgggttttacttaattatcacatttcattccaatgacaagcctgaaggtattaggattgtcaaatatttttattgcaaatatgcattactaaggctattttttaaaaaatacttcgctatataaagtcatattcttctctgagatggacatttagcaaaaataaagtcacagacttaacattatagtcatgaataaatgttttaaaattatgagggagaaagaacattaactagagaaaatgttgctacatcactttcaaaataagcacatattttaaacagacatggtttgcagaagaggattctcatcttacagataagaaaacaaacctggagaccttaaggaacttgatcaaggtcacatagccagtgacagatgcagggtttgaacccacattggctggacagcactgtctgtatgtacagctcctcccacatcccctgcaagagtccaggggttctcacctgctcaagggtttgcaacagagacttcacttgaatccctgattgagtctctggttcctccaagctcccctagttcctctttgtattagtccatcttcacactgctaataaagacatacccaagactggggaatttataaaggaaggaggtttaatggactcacagttccacatggctagggaggcctcacaatcatggtggaaggtgaaggaggaacgtcacatcctacatggtggcagggaagagaaaacttgtgcgggggagctccttcttatagaaccatcagatcttgtgagactcacgatcacaaaaacagcatgggaatgacccgcccccatgattcaattacctcccaccgggtccctcccacgacacatgggaattgtaggagctataattcaaaatgagatttgagtggggtcacagccaaaccatatctctcttctttccagtttcacattgactcagacacttccttcggtagagcagtctctgaaggccctgtattagaggagaatgcccttgcccaatcctggcagaaaacctctctccacagctcacacccagagctgggctcaggccagatgcggaagagagataatgagagaaataggaagcgtctgaagctggcagccattgtggtcccctgagctggctggttccttttcttctcccctgaagctcctgcccactgggagccagctcctgtccaccctaccccagtttcaagagttcctaaaactctggtgtgaaccagaaccactgggaaacttgttagaatgcagatcccttggctccaccctcaaaaattctgattcaggataatcaaaaacgggacccaggaatttgcattttaagcaaacaacccacgtgaattctgctgcatggggtcctcagaacacacgttgagaaatattcaatagacacgctattcacattcaagagtaccaatgaaggcccataagctatgttgaaatacttagaagttatctatcaagtgaataaactgtcaaatatatatacataactacatggcaggctagaattcctgggctctatagcccaagccagaaggtaatgggacagcaagagctaacccccagctgccatccttcccctttgtcttcccactttatgccatgaggaacttgcttcttgagcaagaggacacaccatccataaattcaagcacaggcactctccgtccaccctgtaacagctgcatcttgaccacctattgggctagaatggaccccagagaggaagctggcattgaccctggaggcagaaaattcccaggcactcagagcatggcctagatggggaagagtttccaggaggacgcatgcccttgaccttgcagactcataattttaaaacatttatgactaactataatgttaaatctgtgactcagtgcggaccttgcctgcactgaggggaagggcagcagaggatggccggggcagaaccctctaagctgacatttctccaacattcatgggaatagaaatttcctgggatctgaatcagtaggtctagggcagggaccaagattctgcgtttctaacagcctcccaggtaaagctggtgaggctggtcttcagaccacagaatgaagcagcaaagctgtaaagcaggggtcagtaccaggtagtaaacttttagtctctgagggccatgtggtttctgtggcaattattcaactctgctgttgggcatgagaacagccacagatgatatttaagagaatgagcatggctgtgttccaggaaaacttcatttgtgaacactgaaatttgaatttcagataatcttcctatgttgcaaaatattcttcttttgggttctttccattatttaaaaatgtaaaaactcgatcaggcacagtagctcacgcctgtaatcccagcattttgggaagccgaagtgagtggatcacctgagatcaggagttggagaccagcctgagcaacatggcaaaaccccatctctactaaaaatacaaaattagctgggtgtggtggtgcatgtctgtaatcccagtaacttgggaggctgaggcaggaggatcacttgaacccaggaggcggaggttgcaatgagcaaagatcgcaccactacactccagcctgggcgacagagtgagactctgactcaaaaaagtaaaaactcaatcataacgtaacttaattgtacatgtaaaaataaaagagtataattggattgtttgtaacactaaggataaatgcttgaggggatggataccccatgttacatgatgtgcttatttcacatcgcatgcctgtatcaaaacgtcccatgtaccccataaatatatacacctactatgtacccacaacaattacaaatttaaaaatttacaaaagatttttaaaatgtaaaaaacattttttacataggctatacagaaacaggtctggatggggaggttagatttggcccaaagtctgtagtttgttgaccccttctctaatatatatggcccaagtcaggcgccgtgcacagctgggtctaagagctgtgctgatctacaaagcccacatgaagctgctgtggcagaaagggtctagagcctcactgagtcatgtcttttggggatagatgggtcttctaggtgcccatcaaatcacaccttctcgggctgccttcagtgcacacctatgagaccaatcttgctgatccagggcaggaagtctagtccagatccaccctgctgtgttacccaggagctcagattcagtctcagaaccatctggattgttttattctcatgatgtacttaatcctgattgaagtataaatgaataaactggctgggcgcggtggctcacgcctgtaatcccagcactttgggaggctgaggtgggtggatcacctgaggtcaggagtttgagaccaccctggccaacatggtgaaacccccatctctactaaaaatacaaaaaattagcttggcatggtggcgtgtgcctgtaatcccagctactccggaggctaagacaggagaatctcttgaacccaggaggcagaggttgcaatgagccaagatcgtgccactgtactccagcctgggcaacaagagcgaaactccatttcaaaaataaataaatacataaataagcccattaaacatcacgaatttaatgtgaggccaacattcttactggtgagaaatgattctccatcgttcttgggagaaagtgacgctgcccgtcctcaggcctgggagctgctgaggaggggagagtgaggaggttggtttatgtaaaaggtgtggcactgccactctgtgcagattcctggaggattcacctgactacttattgatttttcattgaacagctttctcctcgttcagactgtgggctctctgagaagatggggaaacattatttgggagatttacccttagggtgaaaattatctaagcttatttctcaatttccctctcctcccctcatttctcatctctaattttttttctttcttttttattaaaattttttgtagagacatggtctcactatgttgcccaggctggtcttcaactactgagctcaagcaatcctcctgctttggcctcccaaagtgctaggattataggcatgacccactgtgcccggcctcttaattttttaagcatcacaggttgtatccccagaaaccagactctaaagaggcatttcatgaaggcgtgcctgtgggagggaccacacctgtggaaggtaggggacagaagcaggagtgggcagagcagtgacgttgagctacaacccaaggctgacagtctcagcaaacctcaccaagagctctggagttaggtggacttttagaaacatgccaagcatggctgagctggccaagcccttatgctccaccatccattggtcactcgatatgagcttccccaggcatgagtgtgctatggtctgaatatttgtgtccctccaaaactcgtatgttaaaatgctaacccccaaggtgatggtattgggatgtggggcctttgggaggtgattaggtcacaaggatggagccctcgggatgggattagtgcccttatagaagacaccccagagaggtccctcccttatcccttccaccacatgaggatacagtaagaagacattctctatcagttaggaagccaaccctcaccaggcatcaaatttgctggtgccttgactttggccttcccagcctctagaattgtgagaaatacatttctgttgtttttgaactacttagtctctggtaggatagcagcccaaaaggacaaagatagggcatgtccttgggtgaggcagctctctgcagctcagtcactttctgagagggctaagagctacaggctgactgcagcagcacttctagcagctggggcctgatgtccttcactgtcctttctgggcagcatatcacagtatccactgcacaccactcggctatcattctgttcagatacttcttgactggtctttctacttctaatttgttccatgtagaatctatcctaaacactacttccctaatctttcttaaaggaaaatattggtaaaatatttcatagtctgtcattatgaataattttatatgtcattcccctgaaaagaggtgttacaaggtcaagttttttcagttatgcaggaaatgtaagtgtgtaaagaagcaggatgaggccaggtgtggtggctcacgcctgtaatcccagcacattgggaggccaaggtgggcagatcacttgaggtcaggagttcaagaccagcctggccaacatggcgaaaccccgtctctactaaaaatacaaaaaaaaaaaaaaaaaacccacaaaaattagccaggtgtggtggcaagcacctgtagttccagctactcgggaggctgaggcacaagaatcgcttggacccaggaggtggaggttggaatgagccaagattgtgccactgcactccagcctgggtaacaaagtgagaccctgtctcaaaaaaaaaaaaaaaaaaaaaaaaaaaaaagaagcagagtgcaatacaacatggtatgatggggtcttatttagtttgatttagtttgcctccacttcaccccactggtgagggagggattccgccctagagttgagaggatggttgaatgtacaacatccaagcctagacagatgagatgggcagcaggtaattagtcacatatgctcatggcccagggaaggacgacactgccccacagagagccacgtgggggttgcagctgggaacagagtgaaccaccaggaagctgtgggaggcaggctttgtagtaacaagagggcgaggtgcccctggttcctgtaagaggatgtgtttggtttgcttggataattctacaggctgacggggacctgaagcctagcactgcgcctggtccctttgataaggagggttgcttggctagaggactttatccaccaggagcagagtgggaggagaacttgcagttaatccatttgagcctctgtaccctgattttaccagcctccatggtcaaggcagcacttagttttgaatcttaatttcaggccttacaccacaggtctatgagtcattggagctgaatttcctatccaaaggtattcaaaattattttcaaatctgatctggccaaacagaattctaccattcatcactgctggttttcaagcccgggcccactccagattccctagaatggcacatcagggcattcctaatcaggcctaatccatatctcctttctcatcatccctgctaaatttcagcctgagtttacacacattcactggacaacttgtgtttttggcatactcagctgtatgtttttcctcactctatttcctccagataaggactagaaattctagccgtgctttgaggccaactcaaatgtaacctcctctggggtgactttcctgggcattgcaggataagtgcctggatggccttgataacccagctcttcccccatttttcacttgtagttctcagaataatgctagaatgtgctggaaacaacattctgagataaggaaaagctgtccagaatatgccagattctgtttctgttcctcttaggacaagatgtcctccaatgctgtggtccagtgatcccagtttccccccagggtataaaacccagagtggagtgctttcagagtgcctcagctacagtgcattgtggggcatgtgcagacaagactccatccattctgagtagcttcctgagccttgcagaatcagctcgcaatggatgctaggcttctgttgtgccttgctgcctatctgtgatgaataaagttgctttgcctaacttgttctgtgagtgttctgtctccctcaactcctgcaagtggtagaaattgcagcccaagatgcaataggcgcattttgggaggccgatgtgggtggatcacttgaggtcaggagtttgagaccagcctggccaacatggcaaaactccgtctctactaaaaatacaaaaattagccaggcatggtggcgtgcgcctgtagtcccagctactctggaggctgaggcaggataatcacttgaacctgggaggtggaggttacagtgagccaagatcgcaccactgcactccagcctgggcaacacagtgagaccccatctcaaaaaaaaaaaaaaaaaaaaagatgcaattggcagaagtatctggactcctcttcctggtggttggttggcatagtgatgatctttgctatcctccatgtagtaggatctcccctggaattggtaaccagagtacagtgaacctgcctcacaggcatctcaaacagaatgaaaggtgccttgctttttattcctaaagatttttctttttccatcctggccatatgattcagtagccacattttagcctctcagttgtgcatgtgcctccacctggccacgttgtgagctctttggggaggcagaactacactctccctttaccgcctcagtgttcaacatggtgcctgatacttgggtgctcaatcaatgagttgcacatggaaaatttaaagaaataaggtttttggtggagaaaagaggtgaaaagtcatggccaaaatgaagtggagattttgctgttgtcgctgtgctatcgtctttgtgttgtgtttcgcacggatttgaactgtccgtgtccagcctgttgctctttagcatgattctaacctacacctatgggtgttctctgcatctatctcctgattaagcacatgctattctcacaggcaatttgttctggcagcctatgatgtcatttctaggagaacactcttgtccagtctctgctatcctagcatcctcttgctcagaactgaagtttcccaagaagactatctcctgtttgcaggacttacttttctatttttcccttagagggttacctatgaagagaactttacactgatataaagtcatcacaaaatcatttttgaatattcagtacaaataatgctgaagactggctaaagagtatgttatcactgctctaagctttgcatttgggttcatctgtggaagcatagtaattcttgaaatttcctctgcacttctcttagtttatctctttctgtcatgtagaagttattcatgttcacattttatcttccctcctagaccaggagtttcattaggaaaaaaagaaatttttcattatagagaatttgaaacatatacaaaaataacagagaagagtataaactctcacatacttcatgaactcatggacaatgttgtcacatctgtactcccattccctatggttctaagtttttctaattttttaatttttgagatgagatctcactctgttgcccagggtggagtgcagtggcgtgatcatggttcactgcagccttgacctcccagattcaaatgaccctcccacctcagcttcccgagtatctaggactacaggtgcacaccaccatgcctggctaattttaaaaaatttttttgtagagacagggtctcacagtgttgctcaagctggtctcgaacccctgggctcaagtgatcctcctgtctcagcctcccaaagtgctaggattacaggcatgagccactgagcctggcctaattttttttcttttctctttttttgagatggagtctcgctctgtcacccaggctggagtgcagtggcgtgatctcgactcaccacaacctccacctcccgggttcaagcaattctctacctcagcctcccaaggagctgggattaccagcgcctgccaccatgtccggctaatttttgtatttttagtagagacagggttttaccgtcttagccaggctggtctcaaactcttgacctgggtgacagagtgagaccccatctcaaaaaaaaaaaaaaaagaaagatgcaattggtggaagtatccacccacctcggcctcccaatgtaatagaattacaggtgtgaaccaccatgcctggcctcaaattttttttttaacaattttttaacaattttttttccataagttattggggtacaggtggtatttggttacatgagtaaattctttagtggtgatttgtgagattttggtgcatccatcacccgagcagtatacactgcaccatatttgtagtcttttatcccttgccccctcccactcttccccccaagtccccaaagtccactgtatcattcttatgcctttgcatcctcatagcttagctcccacatatcagtgagaacatatgatgtttggttttccgttcctgagttccttcacttagaataatagtctccagtcttatccaggtcactgcaaacactgataattcatttctttttaggtctgcgtagtattccatcatatatatatatatgccactatatatataccacaatctcttcatccacttgttgattgataggcatttgggttggttccaggattttgcaattgtaaattgtgctgctgtaaacatgcatatgcaagtatctttttggtgtaatgatgtaatgacttcttttcttctgggtagatacccagtagtgggattgctggatcaaatcatagttctactttttgttcttttttttttttttttttttgaaacggagtttctctcgtcacccaggctagagtgcaatggcatgatctctgctcactgcaacctccggctcctgggttcaagtaattctcctgcctcagcctcccgagaagctgggattcaggcactcaccaccacgccaggctagttttactttttagtagaaatggggtttcaccatgttggccaggcttgtcttgaactcctgaccacaggtgatccacctgccttggcctcccaaagtgctgggattacagatgtaagccaccacgcccgaccctacttttagttctttaaggactctctacactgttttccatagtggctgtttatactgttttccactgtggctagtttacattcccaccagcaatgcagaagggttccctgttcactgcacccatgccaacgtctactggttttttttttattttttgataatggccattcttgcagaagtgaggtggtatcgcattgtggttttgatttgcatttccctgatcattggtgatgttgagcattctttcatatgtttgttggccatttatatatcttcttttgagagctgtctgttcatgtccttgggccactttttgatgggattttttttcttactcatttgagcttgttgtatattctggatattagtcctttgtcagatgtatagattgtgaacattttctcccactctgtggttgtctgtttactgtgctgactgttccttttaccatgcaaaagttctttagtttaattaggtcctagctatttatctttgtttttattgcatttgtttttgggttcttggtcatgaaatccttgcctaagccaatgtctagaaaggtttttccaatgttatcttctacaatatttatagtttcaggtcttaggtttaagtccttaatccatctttagttgatttttgtttaaggtgagagatgaggatccagtttcattttcctacatgtggctagccaattatcccaacaccatttattgaaaatgatgtcctttcccccagtttatgattttgtttgctttgttgaagatcagttggctgtaagtatttgggtttatttctgggttctctattctgttccattggtctgtgtgcctatttttataccagtaccatgctgttttggtgactatggctttatagtatagtttgaaatcaggtagtgtgatgcctctggatttgttctttttgcttagtcctggtttggctatgtgggctctgttttggttccacatgaattttagaattgttttttccaactctgtgaagaacgatggtggtattttgatggggattgcattgaatttgtagattgcttttggcagtatggtcattttcacaatattaattctacccatccatgagcatgggatgtgtttccatttgtttgtgtcatctatgacttctttcagcagtgttttgtagttttccttgaagaggcctttcgactctgtatcccaggggttttgataggctgtgtcattattgtcattcagttcaaagaatttttaaatttccatcttgattttgtttttgacccagtgctcattcaggagcagattacttaatttccatgtatttgcatggttttgaaggttccttttggagttgaattccagttttattccactatggcctgacagagtgcttgatataatttcaattttctaaatctattgaggctcattttgtggcctatcacatggtctatcttggagaaagttccatgctctgttgaatagaatgcagttgttggatgaaatgttctgtatatatctgttaagtccatttgttccaaggtatagtttaaatcctttgtttctttattgactttctgtcttgatgacctgtctagtgctgttagcagagtattgaagtcctccactgctattgtgttgctgtttatctcatttcttaggtctaatagtaattgttttataaattttggagctccagtgttaggtgcatatatgtttaggattgtgatagcttcctgttgaacaaggtctttttaccattaatgtccctctttgtctcttctaactgctattgctttaaagtttgttttgtctaatataagaataactacccctgctcgcttttggtgtccattgcatgaaatgcctttttccacccctttactttaagtttatgtgaatccttatgtgttaggtgagtcttctgaaggcaacagagagttggttggtgagttcttatccattctgtggttcttcttttaaatggagcatttagaccatttatattcaatattgtattgaaatgtgaggtcttcctcctcaggaacattgattattcttaggtttggtcatttaacataatcccagacttcttggaggctttgttcatattttattattcttttttctaggtctttgttggattgtgttaatttgaagaccttgtcttcaagctctgaatttctttcttctgcttgttcaattctattgctgagactttccaaagcacctgacatttctaaaagtatgtccaaaatttcctgaatttttaaattatttttttctgtaagctatctatttccttgaatatttctccctttacttcttgtatcattttctggatacttttgcattgggcttctcctttctctggtccctccctgattagcttaataactaacctcctgaattctttttcaggtaaatccgggatttcttcttggtttggatccattgctggtgaactagtgtgattttttggggatactgaacagccttgttttgtcatattaccagggttgattgtctggctccttctcacttggataggctctgtcagagggaaggtctagggctgaaggctgttgttcagattcttttgtcccatggggtgttcccttgatgtagtacacccccctttttcctgtggatgtggcttcctgtgagccaaactgcagtgattattgtctcttttctgggtctagccacccagtgagtctagccagctccaggctggtactggaggttgtctgcacagagtcctgtgatgtgaaccgtctgtgggtctctcagccatggataccagcacctgttccagtggaggtggaggagggtataatggactccgtgagggtccttaacttcggtggtttaatgctctatttttgtgctggttggcctcctgccaggaggtggtgctttccagaaagcatcagctgtagtcatgtggaaagggactggtggtgggtggggccctagaactcccaagattaaatgccctttgtctttccctaccagggcgggtagggaaggaccataaggtgggggcggggctgggtgtgtctgagctcagactctccttgggcaggtcttgcttcagctgctgtgggggatgggggtgggattcctaggtcactggaattgtgtacctaggaggattatggctgcctctgttgagtcatacaggttgtcagggaagttggggaaggctggcaatcacaggcctcacccagctcccacagaaaccgaagggtcggcctcactcccaccgtgcctcccccaacagcctcgagtctgtttcctggtggagggtgagatgggcttgaaaacttgcccaaggctttttcccttccagctgtggaagaaaagggcttcagttcttccccctgcatgtgaagtctgcacaccagattcatgctctcccctaggttctggtcaggaggcttcttgcccctttcaaattgttataaagttcagctagagaattccttctccctatggagttttacccccttctcctctggccaccctcctgatggatccctgtggtgtcaggcaggaatgggctgcttggggacccaacgagctcccaggacctttctgctgcttcctctacccttgtattttgctcggctcagctctctaacttgactcagcttgaggtaaagttggaaacttctcccaaaaacagaccttccgcttccccagtggtgatgtgtgtttggaagaggagggtccccctttcccacttccgcagttggggcactcacagtatttggggtgtctcctgtgtcctgcaggggcagtccgcttccttcagagggtctgcggctcctctcaggattgctggtttgttcttgcagttgatctggagggttattctccagctgagggtaagggtcagtggaccctgcaactctgcagttccacctctgccacccctgccgctaccgccaagccagtgacctcaggtaccttccctgccccacccacccagacgggtgccccttccttgccagcccaggtgcacccacctggccctaattttttttttattgtgctaaaaaatacatgttataactttgcattttaatcatgtttaagtatacagttcagtggtattaaagacatccgcattgttatgcaaccatcaccaccacccatctccagaaaagagttcttacaaaactaaaactctggacccattagatggtaactccccacttcccctcccccagtctctggtaatcatcattctactttttgtctctgtgaatctgacactctagataccctatatatttgcctacccccacttttttttttttttttttgagacacagtctcactctgtcacctaggctggagtacaatggcatgatcttggctccactgcaacctccaccttccgggttcaagagattctcctgtctcagtctcccgagtagctggaattacaggcacatgccaccacgcccagctaatttttgtattttttgtagagatggggtttcatcatgttggccaggctggtctcaaacttctggcctcaagtattcagcccgcctcagcttcccaaagtgctgggattacaggtgtgaggcaccatgcccggccatatttgtccttttgtgtctggcttatttcacttagcacgttttcaaggttcatccacgttgtgcatgtatcaaaattgctaatactattttaaatcatgttacacatatcattttcgctcattcataaatatcttactatgtgtctctaaaagataaagacgttttaacataaccacaataccaatgtcacacctaaaaataaacaattaaaaaataataggaaataaaaaaggtagtaattccttactaccatcaaatacccttccagtgttcaaattttgaattgcctcataaaagatagattctccaccgttcttgagtacagaattcctgtttaatttgtcctgacaaccttcctctccccatagtagctgtcttgcacacaaaagatgctgtcatactacatttcaccaataggtggcacgaataatcatgacatttgctaaatccagttggtatttacacaagaggaaacatcatttgcagaaagttggcaattataggtaaatatacaaacacagaaattgaaaatagcctgtttgctctatgtaacacgcataaaacctgaatacatcccaattctaagggataattattgatatcattcaaactttctatttgttttaaggagaacatggaaaacgtatttcttggtgttgacgtttatctctacaatgtcaacatttttagtgttaaataattgaggccagttatgtttatttattcttccgcttaataaaagaaaaagtaaatagaatctacttgtacaattgattgctgtgttaaatgcccgttacaaatgtattgtctgaattgtattaagtgtacttatctctgaataaaacagttgctttcccaaacttcctctagcgtgttctgaagaacagagaatcttaggatggtagatacggacagggcctttaagaccacctagtctggccccatcatctgacagatgaacagacatgaaacctcatcgtaagatcacacaacaccttgatggcttttgtgtaatttgttatctttctgccagcaatctcaccttctcccctccacccctactcttaaaaaactaactgcttggtaaaattaatatttcattttaaggatgcaaaacccaaattgtgcaattaatcctccctttcttgtcctttcaatataattaattaattaattaattaatttttttttttagatggagtctctctctgttgcccaggctggagtgcagtggtgcaatctcagctcactgcaacctccacctcctgagttcaagcgatgcttctgcctcaacctcctgagtagctgggaccacaggaacatgccacaacctctggctaatttttgtatttttttgtagtgacggggtttcatcatgttggccaggctggtctcgaagtcctgacctcaagtgatctgtccgtcttggcttcccaaagtgctgggattacaggcgtgagccaccgtgccctgcccctttgcatatatttagcaaatatttattgggtattaccaggactaaacaagatcttgttcccttggtcaactgagccttttatttgagtccatgtcttgtaatttcctagaaagaaatgaagctcggccaggcgcggtggctcaagcctgtaatcccagcactttgggaggccgaggtgggtggatcatgaggtcaggagatcgaggccatcctggctaacacagtgaaaccccgtctctactaaaaatataaaaatttagccgggcatagtggcgcgcgcctgtaatcccagctacttgggaggctgaggcaggagaatggtgtgaacccgggaggcggagcttgcagtgagccgagattgcgccactgcactctagcctgggcgacagagccagactccacctcaaaaaaaaaaaaaaagaaaagaaagaaagaaagaaagaaatgaagctaactttaggaaatcagcctgtaaggaatttctaatgggcagtaaatatgacgcttttcagcccagataacataataattctgagtcattttttatcctatcctcctatattcaaattaacatttaatactggactgttctttctgttcttaaaatcagctcctccagccaggacaggccctaaactctgctcttgaaagtaggttctcaccaaatttatcccaagaacaacttccttttatcttccccagatgttccggaatatttgggctcttttccctgaaatggcacttcccacatgttggatacggccctttgccctttctcaggctgtgtctgcattcttctctcctcttttcaactaccaaaccctcgcctatacaactttatggcttcattgggcagttcatcccacctggtaaataagcacacattcacgtctgacgcatatgcttcacttccagtagtaccttccagtgtgttctttgagatattcataagtggggagatattccatagtcaaaaagtttgagaagcaattgtttaaacaaatttaaatagcttcctttactgcaggacttttcagagtctttgatttcaataggcatcattggtcctttaagataggaagatagtactgtatggggcattttcaaaattgatttgattaaaaagcactaccccttgtcttactgtgctcaggctgcgattacaaaataccatagactgggtggcttaaacagcagacatttacttctcatggctctggaggctgggaagttcacggtcaagggccggcagattgagttcctggagagggcactcctcctggcctgcagatggctgccatctcactgtgtgctcatgttctggagagtgacccagcccttgtctcttcctcttcttgtaagggcactaatcccaccacgggggccccaccctcatgacctcatgtaaacctaattatttcctgaagactccacctcaaatgccatcacattgggggttacagcttcaacatatggatctgagggggacccaagcctccagtacatgacactccttttgttttcctcattgcaccatctgctactgggttctgtggaatgcacatagggacacacaaactccagtgcaggctctgggtctgaaaacagacaacctgaactcaatcccagctccaccactccctagctgtgggacttgggtaagtttctcaatctccccaggcctgttttccagctggaaaacgaggataatagtacctacctcatagagttgttgtgaagacgaaatgcttctatacagggcaatacggggccacacaaaggaagcactaaaaaaaaaatgtcagctataatcatgaaatgtcagtatcaataattaactataattaaacaatctattatatcggttattaataaacatattatagtgaatgaaacttattatgtggcaatatttaatttattttgaggctgaatattgaattctatgaaaggatcatggtcaagcttctattttaggctcttagaggacaatatagcattgaaagaaaatcacaagagaagccatggcaagcatgagccaggaatcagaagcagtgtggctgggcttaaggaagaaggggccactgagctcagtgccaggactctgtgccaaccgccacagccctgacaggaagcagagctgttactctgcaaaggacagaccagccacacaaagagggaggcaggcctgcccatcctcccggctttgtgcagatagatttggactcgtggtagtgtcatctttgaatgtgcattgcagtttcacaaccatacctacctcaccaaataatcctagaatagtgaacttcaacacaaatgtcccctgcaatttcaggggcttaagtggtccctttatgtaacaggcaaaggattagggccagctgggaaaatccaagtgtttaaaacctgttcagcacttttgcagccaaagagtaagttgccaaacatttttctctcaaaagaaaacaggccactgaatactagaaaggggaattctggaaggaaagaaaaaatcaaagaagagaagagaagtgaagggacatcttgggaaaagtaaaatgatgttgaacttaaaggtttaggacattgagaaggtaaacttgaacatttttctttaaaataaaaacacaacaaaaagagaaacaatacaagatgattttaaaaagcaaaccaaggggaaatttttacagtctattaatttctagatgtaataaaattaaaacacagattcttgcttaacagatcccaggagcattcagagttatggatcaggttcttcctgagagggaatctgaaggtcagtgtgtgacctgaggaaagcacctccttggagctgccaggcagccctcatctcccagcatgactatcctgccttctcactactgtttcattgaatcctccagggatccacaacgccaaactccagatcctcattcctttagatccttctccagcagcatcacagtaggaaacattccaaagagaatttcagtttccagtacaactacacacacaagatgtctatgggcaaaatattttatgggtgatatactcttttttcttttttctttttttgagacagggattgctctgttgcccaggctggagtgcagtggtgccatcacggctcagtgcagcctcaacctcctgggctcaggtaatcctcccacctcagcctcccgagtagctgggactacaggcacaagccaccacgcctggctgatttttgtatttttagtagagatggggtttcaccatgtttgccaggctggtctcaaactcctggccttaagtgatccacccatctcagcctctgaaaatgctgggattacaagcatgagccatcgtgcccagcctattcctctcctttataatttttaaattgtgataaaattaaaatatgcacaacataaactttaccacattgaccatttttgagtgtatagctcaatagtgttaactacgttcacattgttgcacaagcaatttccagaacttttttatcttgcaaaactgaaactctgtacccattaaagaactcatttctgcctctgccactgccgggcaaccaccgttctattttctgtctctatgaatttgatgactcttgatacctcgtataagtggaatcgcacagaatttgtccttttgtgactggcttttcacttggcataatgtcttcaattttcatccatgttgtagcatgagtcagagcttccttgcttttcaagactgaataacattccatcgtatggataggccacatcttgtttatccattaatccgtccatgccaggaatacgttttaagaagtccatgaaaatgcttggagttgtgtttaaaagagttttataagtcatgattggcagcaattattaagcacccttttctgattagccagcattgaaaagagacaggactggccaggcgcagtggcttacatctgtaatcccagcactttgaaaggctgaggcaggtgaatcacctgaggtcaggagttctagaccaccctagccaacatggtgaaaccccgtctctactaaaattacaaaaattagctaggcatggtggcaagcgcttgtaatcgcagctacttgggaggctgaggccggagaatcacttgaacccgggaggcagagtttgcagtgagccgagatcacgccactgcactccagcctgggcgacaagagtgaaactccatctcaaaaaaaagaaaagaaaatagacaggactaagtgatttggatctgcatgctgacaggcagatagacaggcaccggggcagactgagcgatccagacctgaccagccctgctgccagtggaggtggaaggttcccaggaaggcctgagagtctgggagggaaactgcctaagggggtgataaatggaatcagcagcggagccccaacactgacccaggcactgacaaagcaagcctgacacgttgggaagggatttagcactagaaaaaagttcctttataccaagggtatccgatcttttggcttctctgggccacattggaagaattgtcttgggccacacataaaatacatgaacactaatgatacctgatgagcacaaagaaaaaaaataccacaagaaaatttcataatgttttaaggaagtttacaaatttgtgttgagcctcattcaaagccatccttggcccacaggcagcccataggccatgggttggacaagcttgctctatgttaaatgttcccacccacctaccaattcatgtagtctgcaaatacttactgactgcctgctatgtgccaggcactgttctaaaatttgagaatatatcctcgaataaagcccaaaggctccccattctcctagagtctacattccattctattgaagtggagagacacactctaaacagataaataaacaaggctgagaggtcagtaaaacagcatgttgcatgcgagtgaggcggggtctaaataagaatgggaagttagggaaagcatctctgggaagtacctatttagcctgaggcctcaatgcctcaaaggagttagtcgccatgcaatgatccaggaaggagagtgcgcctggcagagggaacagcaaatgccaagagtgagcctcaaatgggagacaactcactacatttgaggccagtgttggagtagagtgagggtggagtgggaggatgggagaggccagtttatgcacagcttgtagctgagtacagaaggatgtttcaggaatgtgtggaggaaggtaagggaggaggtctctggcaagtggaggaaggatgcacagaaagaagcaatgcttgttgaggaacaagaagcaattgctgtgagtagggtctggcatgagtgatgatcagtgaatgacaaagttggagaggtgggttggggcaagcctttgagacaccaataagaagctaatgaagggatttcaactttatccagctaaccaccagaaaccattaaaagtttttaattagagaagtgacctcattttcgttttaaaaataaacttgttgctgggatggatttgaatggaagggtgacacaattctcctgggaaacaaagaaaattgaactgagcaaaaggagtggaagaagcagagagggcgcggcatgtaagggataccatcgagggcagatcattttggtctttttaaaaaaattttttttaattcttaattttctttttttttcttttttacagagtattactctgtcacccaggctggagtgtagtggcatgatctcagccactgcaacctccacctcctgggtttaagcgattctcctgcctcggccttccaagtacctgggattacaagttcatgccaccacgcctcgctaatttttgtatttttagtagagacagggattcaccatgtggatcaggctgttcttgaactcctgacctcaactgatccacccgacttggcctcctgaagtgctgggattacaggcgtgagccaccacatccagcccattttttttgtttttagagatagagatctcactctgtctctcaggctggagtacagtggtgcggtcgtagctcactgcagctttgacctcctgggcacaagagaccttcctgcctcagcctcccaagtagctgggactacaggtgtgtgccaccatgcccagcttttcttggtcttgttgtaaactgacctttttatcattatgaaatgactctaatcatttctagtaattcttcttgtcttgatgtcttcattgtctgaagtcaatacagctaccccagccttcttgtgattggtgtttgcatgggtatctttttccatatttcactttgaacttgtctgtttctttatattgcaagtgcattctttataaacagcttataattgggtcttgcctattttatcttttaaaaaaatctagtctaataatctctgcctttatttgaaatgtttggtggtccatttacatttaatgtaatcactgatatagttgggttcaagtctacatcctgctggtggggggtttctatttgttccagctgctttttgttcttcttttctatcttctctgtttattgaataattgttaatatttcattctatctcctttattgatcttttagctatacttcttggcattttaaaatagttgttctagggattacaatttacacccttaacttatcagggtctactttgaattcatagcatctaatataagaattttacaatagttgtgttccatttataaccaccccagcccccacacccaatcctttaagctatagtattttacttccgcacatgttaaaagggatagattcacttggaagcttgttagattttaaaggtgagaaaaagaagtttagctgaactccaagcttcctgacttgggcatatagtctacaattcatctagaaaagaaatcaccagtctgggagtacaaatgagatcataattgcagtaacacttcgaatcttaatttttttgtcctcccacctgcttaattataggaagtctggccttacttgtgatttctcacctctcaaatgtctgagcagcctcagggagtggttgtacaaacctgtgaatcagcctagtcactccttctctagaaagttttccccacttcaactgttgccaggacgtttatggtgaggaacagcttgggagcatgttttttcttgttgttgtgttttgttttgttctgtgtgtttgttttttgagacagagtcccactctctcacccaagctagagtgcagtggcatgatctcagctcactgtaacctccacctcccaggttcatgcgattctcctgccttagcctcccgactagctgggattgcaggagcccgccaccacacctggctaatttttgtattttttagtacagacagggtctcaccatgttggccaggctggtcttgaacacctgacctcaagtgatccgcccgcctcagcctcccaaagtgctgggactacaggcatgagccactttgcccaaccggcagcatgttttaagtgagggggatgtgcactctcccgatgcattatgctcactcagtaaaaaggtcttcagcaaagatgtcctgtttctggagcatctatctcttctgatggacacatttgtatggatgaatgaaagggataggagtaaaacttaaagtctcaacaggttcccagtggccacccaagcatactgttctaactgttggttggctctatcttgtggtagggttaaatttgctcaaatgcttcctgtgtaggtgaagagaaatggattcacagatggagtctgtcttgggcctgtattttggatatttgcccattggagatatttaatatatagctaaatattttgatctcaagacagaagccagaggtgaatatgtagattttcatagaggtgataatattaataaaagccacaagagtgaatgtgtttaccaaaggagaaaatgtaaagaaaaaaacattagagggtcaaacactaaaccatggaaagtggctaatattgagggttaaaaagtattgataaaaatacaggtacaatattcaaaagaatgcatttttatataaaaccaaagggaaggatgttatatcaagagctgtccataggttcctcaaaaaattaaaaataaaactaccgtatgatctagaaattccgcttctggttaaatactcaaaagaatggaaagcaagatctcaaagagatatttgtacacccatgtttatagcagcactgtttataaaaactgaaacatggaagaaacccaagtgtccgtgggtggatgaatggataaacaaaatgtcctatatacttacaatggaatattattcagccttaaaagggatgaaagttctgacccaagctacagcatacatgaatcttaaggatgtaatactaaatgaaataagtcagtcacaaagaaacaaatgctgtataattctacttatataaggcacttagtcaaaattatagtggcacaaagtagaatggtggctgctagggagaagggggagggagaaatggcgggctgttgttaatggtacagagtttcagttctgcaagttgaaaagagttctggggactggttgcacaaatgtgaatatacttaacactactgaactgtacacttcaaaatggttacaataataaattttatgttacctgtattttatcagaattttaaacattgaaatgaaaaggagtagtcatggatactacatggaattacaggaaaatgcacaccttaaaatatttcctggatttggtcattgaaaagagtttgaagtagagattgtcgataaagccagccaagcaagcaaatatcatcactgaagaagtatgacaattgaaccagaaagaggactacagtgaggtgaatagtgtaagttacagaagactatatatgggcatatttatggacaggaaaacaggaatattctcttctgtctgcctacattttttacttctgcaagaaacattaagtcctctgcaagaaacattaatcacatttactaaaatatgagatgacatttacatattccttaattttttattttattttattttatttttttgagacagagtctcactctgtcacccaggtggagtgcagtggcctgatctcagctcactacaacctccacctcccaggttcaagccattctcctgcctcagcctcctgagtagctggaattacaagcatgtgccaccacgcccagctaatttttatatttttagtagagacagggtttcaccacgttggtcaggctggtctagaactcctgacctcaggtgatctgcctgcctcagcctcccaaagtgctgggattacaagcatgagccaccacgcctggcaattttaaaatattttttaatatttttatttttcctttttatagggatatgatctcactatgttgcccgggatggtctcaaactcctgagctcaagtgatccccccacctcagcctcccaaagtgctgggattacaggcataagccatcacactggccagctttgcatatttttaaaaagcattcattttgattatctgcgtaagtcactgttgattattacactggaaattctcactaatttcaagaagtagaaggagacgtcagattaaaggtggtgaaatttaccttgagctttaaccctgctcttcccccaactcaagaacgtttaactattgaaggtggcagggaattagggtaatagccaaaattcacaaatggatcaaaggaatattttttgccagtagagaaactttggtgttttcaaaggcaaatacatctttctgtattcattcttaattcccatgaaaaggtgtgttccttgggataattctaacactatgttgagactgcaagtccatgtgataggatggtatcaggttctgagcgtccacagggagaaaacaaggaatttcctaactaaaaatataaaatcagatctggttctctctctctggaaatttagcagaacccactcatttttaaaggcaggtattgttgcagccccattgtttacccattgctcaaatgcagagagccacattccagggatgtcttacaatgggcacatggggacttgaagtcgttggctgactcactttcttcagtgcacagctctgagctctcattcgtataaggactatggtctttggaagttgattttggtttcagcccaggccaagtccctttgtgccttatctgaagggtatttttggctccagggtggttgttggcagacagtgaagcaaatacaactcaaagctctcatctctgtcgaatcactgccataacaggtaaaatgaactaaggaggcagtgggcaaagcagatgtttacaaagtgagggctaatgcttgaataaacataaaatagacacatttgtaatttggcttgtgccaagacccttccctttctttttttttttttttttttttttgagacggagtctcgctctgtcgtccaggctggagtgcaatggtgcaatctcggctcactgcaacctctgcctcccaggttccagtgattctcttgcctcagcctcccaagtatctgggattacaggtgcctgccaccacgcccagctagttgagatggggtttcaccaggttggccaggctggtcttgaactcctgacctctggtgatccacctgcctcgacctcccaaagtgctgggattacaggcgtgagccattgcgcctggctcctttctgtcttcaaaggagaactaattaatccttgatagggtagggttagggaattcaacctcactgcttaatgccccaccttaggaatgtctgcagctgctgatgctagtgtgtgtgtgtgcctgtgtgtgtgtgtcacatgggatggactggtggagagatgttctcatcagccctgtctacacgagagccctgccaaacagctgaaatttaatttccatcccttcccatgagtcccttctgctacagcagccttctctttccaaacagacactgaactatgatggagttttcttaaggacagtcaggcagatctcaaaagaacagccagtcagtgcaggaagaacaaatgtgtaattccgcccttgaagacgcaggcatccaaaaggaaaggtatctccatggatgtttatctctccttctgatctttttcatgccctctactgcctctcttctcaagagactcccctctgcctccctctgggagaagttctgccacctcagacccacctggtgtctgcaaaccccagagattcaagcctcaggccctcactgatggtggcccttctctgctcaaggtggacccgttcctgtcagtcaggacaacagttggtgaaccaagtatggtttggtctctccatcaacactgtctgatttctttactattttatccaacttggtgagagttgtagtctagggtccatcagccttctgagaagactaaaattctctttctcctcaaaaggaaggggagggaagaggagggttgccaccccacaaactcctaaaagtgacctaccttcttttgcccagttcagcactcacaccgatgcatgggggaggggtttgggggcagtaaagctcccaaaatagagtttctcagcaggccacgaggaattggggccgggctgaacatagaaccctgggtatttagatccttgttttctcactgtggtccttggatgataccatcctgtcacatggacttacaaagtctcaacatagtgttaaaattatcccaatcagcacaacttttcatggaaattaagaataaatatagaaagatatacttgcctttgaaaacatccaagtttctcctttgagaaaaaaatattcctttgatcgatttgtgaattttggctattatcctaatttcctaccatcttcaacagataaacatttttgagttgggggaagagtagggttaaggctcgggtaaattctaccagctttattctgatgtctccttctacatctataaagaatatggtataatgagaagcatgtggtcttgtgaagtaataaaccagggtttgaatcccacatcacccactaagaaggcatgacttcatgtatgttatttgaacctctgagtttcaactcctttgttggtaattattttttgtttttattctgaaggacataaacctatttcctagagtgattataaagacgatgtggggtcaggtgcggtgtttcactcctatgtaatcccagcaccttgggaggctgagtcaggaggatcacttaagcccaggagttcaagacgcccctgggcaacatagtgacacctgcaaaaaaaaaaatttttttttttttgagacagagttctgctcttgttgcccagcctggagtgcaatggtgcaatcttggttaaccacaacctctgcctcctgggttcaagcgattctcctgcctcagcctcctgagtagctgggattacaggcatgcaccaccacgcctggctaattttgtacttttagtaaagatgaggtttctccatgttggttagagtggtcttgaactcccaacctcaagtgatccacctgcctcggcctcccaaagtgctgggattacaggtgtgagccaccaagcctggccaaaaaactttttttaaatagccagatgtggtgtcgtatgccggtggtcccagctactagggaggctgaggtgaaaggatcacttgagcccaggaggtggaggctgcagtgagccatgattgtaccactgcactccagcctgggtgacagagcatgaccctgtcttaaaaataaataaataaaataaataaaaaataaagatgacataaaattatgtatgtaaagcatctggcacaccctgaactaacatatattcattagcttcctctcccacaccctatccttctatgccattcattgcattccctaaaactacctaatataaggtcaccattaacattcttgtggccaggtccagcagcctcttcctgactcctcttctctgcattagtgttgataaggccacctgtctaagaatgtttcatctttgtctttcatgctcttacattttagagtcacagaatacggccaagtacatattactccctgctttgcattattttctgtatcatatgtacccctgtattctcaagctaactatcccagctacagggaaaatcaagtccaggacaaaccattgtccaaacatacatcaagcatcaattaagtgctagtaaaaagggacacaaggtcaaagaggacatggttcttgccatgaggtaaggaaggcggacaaccgcccaactgtatgaccagaactgggattgaaatggatacagtcaccatagaagcagagaggagtgaggggaagagggagcgatatctggatcattctggacatcatgggagacttccttttcgaggtgattgttaactgaatcctgaaggatgagtaggaattaggtaagtaatgaagtagttggaggagccgggtagtctggtgggttccaggctgaagcacaaagagctggtggctatggaggattcatgagcaatgggactgaggaactagatgagcgttgtttcataaggccttgtgggttgacaagaagagtctgaactttatctgaaaattctagaaaactttgaggaaacccctgttggtttgacatgatcagctgtgtgctttatccatgtgagtctaatatggggcagagactggaggatggtgaggctgaagatgtccactgcctagatgattaggcagtttttgtggaactcaaggaaaaagggatgagaacttgatgtaaggcagtaacagaagcagttgggaacagatactaaagatattaagctgactggtcagacatgggagatgaaagagatagagaaactagagatgactcccaagtttctgttttggataactacttagacaataactaaggtttgtaatgtaggagaaaaggcaagttttggaataagagactgtgaatatggtattggactgctaggtctgtttacaatggcaagtgtatgaagaccagcccctccctgtggccataaagatggacctatgcactttaacaggaaattggctgggggtcaggtctgacatcgaggaaaattgagcataatgagatcacccctgaaattccttaattcagaggtgagtggcagcagtacctgcaggcagtgcgaaaattcattaaagaattgttttggatctgctccagtgaacagaaacaagtgactgggtgacatagcaaagcaacaataattttagcttcataaaaatgttaggtgtcagaccgaatataagcagatttttaacatcttaagtcagcactcatatagtaagagcactaagcaactctgcttttccctacggtgattccagtcccctctggactcatctctttcccatgaattcctaggtgactcactcgctcttcttgatggtcattggtggtttcctgccaccatcgtctttgtctctacctccgactccttacttgtttcttctgccccactcccagagatctcctttctcttcctctcacacagctgccacaatagcaccctgactgtaaaatgcacagcttccaggtgtgctggtaaacatttaaaaggtggtgggtaggataggcatggggagctgatttgtagcatttgtcattttctgtggtgtaaatactcccaacttggctgattctaaactaccaaaactaccaatgtgttgtcattcacttccccaaattgcaacgggaaagctctcttgagcttttgcaagcaagttccagcacaccacagcttctgagactgagatgagtcacatttaatgtggtggtgttccttccctttccccagagggacaccctggaatgatagcgagagtctggcttccagtgaagaacacttgacaagggagaaaatctggacatttctgcctttgagttttgcttaggccaatcttgcaattctccctcaatccacgtggtcaccatcttcccacctaaagagcactcacctcctttgagaagcctgtgcttgtcctgacccctctgagcacactttaaagtttatgaattcattccttcctttgccatttccagaaggtctttgtattttgcacaaggactctagttctttgtgctggcatcaattagagactgtttgttttctgttttcccgggttaatggtaaatgttttaagggtaaagatcttatctttacatagcattgatttttgaacatttgattacttgcttatttattaagcctttgctcatttgccttaccataatcttttctataccttcatgtttgaattgtttttatggcttaagtatatacatataatatgtatacataattatataaaatatgtatattctcttttatacactatgaaaacaattcttggaagcacataaaatgtctttgcacaataaagaaatattttaatattgataattcataaattatattgctaggaaattaagtgaaaatttgttggagtgagtctccaatgaaccagtaagtctacaataaaccagttggaaacttactccattactgactaccttgctatgtgagacaagttattcaggcctcagtcctccaagtataaaacaaaggtactaagaaaatgttcagggtgttggaaacgctctgtcagccaaaaaaatgtaaagctcctgaaatctaatataaaagtactctatgaatatgatgtatttgtcaggcataagaattttctagaaaataaaacatttcatgacagggatcattttttaaagctcaagaattcttggaacatctacagaattaggatttgacaaccagtttttcaagaacttggtccaattttttcatacatctgaaagtcagtcaactgtaagaactcaaaatagcaaggagtaaagtgagatactgtaaatacagattagtatcatttatccaagccattgtgggattttctttaggtgaaaaagcaaaacctatgatagaatggcagagaacaaaaaaggaaagagaaaaaaaccctaaatccttgttctgttagtaaacaaacataggtttgaaagtcctaaaacaaggaagactttcaaacctatgtttgtttattaacagaacaagtgttgagaaacttgagtgatgtgaaggaaactggtttcatacaaaagtgtttctttgtgaaagagttttctgcagtaggcagaggtgagagaaagaagaggagaggaagcttctcctttggtgtttcagacctaggccaatgataaaagtaggaaaagtcatcttagacaaagattctctctcctttttttttttggtttttgtttgtttgtgttctgtttgtatatctgtttttgatgttaatatgagcaatgtgtttgaccaacaaggctaagaccaatgatagaactaggaaaagtcatcttaggcaaagattctctctcctttttttttttttttttttttggtttttgtttgtttgtgttctgtttgtatatcttttttttctgactttttttctctttttattattattattattgtactttaagttttagggtacatgtgcacaatgtgcaggttagttacatttgtatacatgtgccatgttggtgtgctgcacccattaactcatcatttaacattaggtatatctcctaatgctatcccccccctctccccccaccccacaacagtccccagagtttttgatgttaatatgagcaatgtgtttgaccaacaaggctaagaccaatgatataactaggaaaagtcatctcagacaaagatcgtctctcctttttttttggtttttgtttgtttgtgttctgtttgtatatctgtttttgatgttaatatgagcaatgtgtttgaccaacaaggctaagaccaatgatagatctaggaaaagtcatctcagacaaagatcgtctctcctttttttttggtttttgtttgtttgtgttctgtttgtatatctgtttttgatgttaatatgagcaatgtgtttgaccaacaaggctaggaccaatgatataactaagaaaagtcatcttagataaagattctctctccttttttgttgtttttggtttgtttgttttgggtttgtgtatctgttttcgatgtaaatgtgagcaatgtgttttgccaacaagtctaggaagggagagattggagaatagggggatagcgagtgttttaacttcccttgagggagatgatttcacccaaggactgtatcttagtttgtgccacacaggatgctgtcctgggaatttcccaggggcccagagcagtatcagctgcagccctgtgccatgtcccccagtcacctggtactgtctcctctctgccacctccaccacgctggccatgctttcaatcaggctagagcactgcacttgtgtgtccaggcttacaaccctataggcttccttaggaaaatagactgaacctgattagggaaaaatcagcttttcacccacagaaagtgccaggttttgacttttgttttcaccaatacctggcacacagtaagagttttattttatttttatttatttattttgagacagggtctctctctgttgcccgggctggagtccagtggcacaatcttgactcactgcagcctcaacctgctgggcacaagtgatcctcccacctcagcctcctgagtagctgggaccacaggagcatgccaccacacccagctaatttttaagttttttgtggagcacagagtcttactatattgctgcccaggttggtcttgatctcctgggcttaagcgatcctcccacttctgcctcacaaagtgctaggattacaggcatgagccaacatgcccagtccaataaatgttttattagcttgaatttggaactttcctaccattgtagaatggcccttagaatccatagtcaagagcattatttattatttactatttacatatcccctgtctggcaggcactgtgctgggcaggaggcactgtgatgaagaagaaattttatagtttacataacaaggggcagaatgtgttctatgctaaagataaacttattttccaattaacataatgactaaaaatcatctcactagaggggtttaaactataaattccttccatgtcatattgtatgacacccctctaacaaacgcttccagccctttcttctttcacacccttcttgctcaacatcctctctccttcttggcttctaggtgttaaaagcagtaaaatagagcattttcccctgaaataaaaaattatttttttaaacttagagaaactgagaaaatgaaaaggctgtaaaagggaagactcatgtatacagaatgagctcttatcattcattcatagatacatattggatatattctacattgataagcattggactagggttgagatagaccttttctcatggaattttcactgtaatctctgtctataaaatctgtgtctatagagataaacacaaaaacaagtgtagaaacaaatatataatctgacagcttttcatgggtgccttaaaggaaataagcagtgctatatgatagacaatcatgcagtgaagagctggagccagcttgcatcagctctcaataactgattgttatgcttcagaactcttccagcctattaccaggcatggtggctcatgcctataatcccagcaatttaggaggccaagacgggaggatggcttaagctcaggaattcaagaccagcctgggcaacacagagaaacctcatctttacaaaaaattaaaaaattagccaggcatggtggtgcatgcctgtaatcccagctacttctggaggctgacgcaggaggatggcttgagcctgggaggtggaggttacagtgagctgtgattacaccactgcactccagcctgggtgacagaggaagaccctgtctcagaaaagaaaaaaggaaagagaaaaaaccttccagcctattgacttcagactgatagctagaaattagctgtggtaggagaatttacaccacagaaataagcaaacgttaacaatcagggattcccccacctaccccacccaccccaccctcaggagccagttgctaaatgtttaccagcaaacaaccaataatggtgggtagaggaattgggctaccttttatgtagagggtgggtgataccctttctatggagataatatttaaacagaccccaaggtttgagaagagaggagtaaaagtgtttcagacaaaaggatccctaagtgcaaagtcattaaggcaggtagcctcaagggtcttctagcacttgtcagcaggtgagagtagccgatgatggggatgaaagccagatgaggtctggatcagggaacatggggctttgtgggtcaaggtcatgcatttaggtgtttagttaagagaaatggaaagccctttaaggggttgaagcaggtaggggtgtgtgtgacatgatttgctttataagttaagaggctcactctggttaccaagtaggagatgaattttaaggtgacaagggcaagcatggaagccattgcagtatctcagttgtgagatgatgtcccgcagacttgcatggagatggcgctgaagatggtaaagaggagacagatttgagatacactatggaaggtgaacttgcaggagacttggctgcaacttgcaatcattattagatggggtcttgctatgttgaccaacctggagtacagtgactattcacagacttgatcatagcacactatagccttgaactgctgggctcaagcaatcctcctatcttagcctcctgaggagctgggactagaggcactcaacccactgcacctggctaattacgtttgttgttgttgttgttgttgttgttgttgttttttgagacagagtctcattctctcacccacgatggaatgcagtggtacgatctcagctcactgcaacctccacttcctgggttcaagcgattctcatgcctcagactcctgagcagctgaaattacatgcgtgcaccaccatgcccggctaattttttgtatttttagtagagacggggttttgccatgttggccaggctggtcttgaattcctgacctcaaatgatctgcctgcgttggccttaattactattatttttaagacagaaagatgttacactcaagaacagaatggactgccttttgtggcatgaatgtaagtctttcctacaggtccttccccactgtatgaagtgaggctctgagtcaggggccctaaccaagagaaactgtggtcactgaaaagtcttggattcacctcagagctcaccttctctctgtgccatcatacagctaactacctcttgattagatgcatgggggaggcggctgacatagttccagcttggtttgcttgatgatggcttgtagaacgcgagcccagaggaaggcgcttgactggtttgggaacagagagtttctttctagtcctctgctgaccttctgcctacttggctccaaactgacaggcaggtagatcacttgaggtcagcagtttgagaccagcctggccaacatggtgaaaccccatctctactaaaaatacaaaaatgagctgggcgtgatggagcatgcctgtaatcccagctactcaggaggctgaggcaggagaattgattgaaccccagaggcggaggttgcagtgagctgagattataccactgcactccagcctgggtgattgagcaagactctgtctccaagaaaaaaagaaaaaaaaaaaagatgtcctttataatttcaaaattacatgtgctaaaatatttaagtaaataattgctatgaatacaaatgtatacaaatgaaatagtaggaaggaactccagcttcatagtaatagaatatttctcatctgtatcggttggccagtagcccagaagtttgtacagtatcatgacattacatcctacaccttcaggcagattaaatagtattataaaatataagaaacagcattgaagtccaactctttgagaattttgaagctcatagcttgaggcagaatggatccacagagaccgagcagcatattatggtttgtattgactggaggatttggattcagactaaaagacaacttcaaatgaatggctgtgttttgagagcacattgctttgtgaatgctttcaagctttttctattttaacttcctctgaaatccaagaggatgtttttaccaaaaatatttacaaggaaatgggaaatttaaatgatccccaaaggaaaccaatttttaaaaacccttaaagacctattattaggcaaacaaagattatacagagatccttctcctgctgcaagtctcaaggacttcttcggggcagcagtgaaacctgtcaggcagctatggaaaaggctttggatctctgtgtgtgcacagaagggcacggaggggaatctcatcttcttaagatcttcatctttaatataagtttctgaattctttgctctataaaccaaaaatttaatcagaatgtgtgtgggaggggagagtgtctcctacatccaggcgtatgagatgatctgaaaaccatgggcaatatttacccatacagaccattgtgatgaagccattctctaagttaatagattctctccttccttccttccttccttccttccttccttccttccttccttccttccttcctccctccctctctcccttttttctttctctctccctttttcattctttctctttccttccctgtcctcctccctcccgccctccctctcttcctttctctttctttctctcccttcctcccttctttccttctttccatctctttctgttttttcattcttaaatttttctctttcctaacttccttccctctctcctttcttctttcttcctgacttccatggccatttactgagcccttgcttaggagctggcgatacagacaaataagtcggggcagccattgcccttggggagctcttcccacagacaaacaatgggagtgtgttggggtagacaccccccgaacctagggatccggtggtgggagaagggtgcaatccaggaaggaaagttgatgtttgaattaaatattaaaagctaaacaaaagcttagttccaaagggaactaagacactgtagtcccaaacaatgaaactggcttgagtcaaggatatggatacacttcctattcttcagaaaattgtcaatgatgattgtatcttgacatcacactttaaaacatgcagggagaatttcctgacaagattctgaagtatagacactctgtcttaccaattgagagactgaggtcgggcgcggtggctcatgcctctaatcccagcactttgggaggctgaggcgggtggatcacctgaggtcaggagtttgagaccagcctggtcaacatggtgaaaccccatctactaaaaatgcaaaaattagccaggcgtggtggcgggtgcctgtaatcccagctactcaggagggtaaggcaggagaatcacttgaacccaggaggcagaggttgcagtgagctgagatcgcgccattgcactccagctggacaacaagagcaaaactccacctcaaaaaaaaaaaaaaaaaaaaagagagattgagcatatgtttgataatcaacgaacagtccattttaaaagttagacaggacatattcctgaagccagcctttcagggttcaaattctttttcttccattttatagtgattaagaagtctgggacaagcaacttaacatttcttggctttgattttctcacctgaaaaatggtgataattacattacctgccatagggttgtgaggttagaatgagtgaatgcgtgtaaagtgattagaagcatgcctagcacatagttagcactcagtgtttagtcgttattcttttttattatcatgtcctcacagagaatctttataggcagggccaagatgttactcaaactgttttgggtccacttcaagaaacctagaaaaactgatgatctaagtcacaaagttctgttatagatcatatccacaattatttacatgagaacatttgcaaaacctggatttaccaactgcagtcattaagaaaaaaaatctatacataaaaatgtctgattttaggccaggtgtggtggttcacgcctgtaatcccagcactttgggaggtggaggaaggtggattgcttgaggtcaggagttcaagacgagcctggccaacatggtgaaaccccatctctactaaaaatacaaaaattagctgggcatggtggtggcgcatgcctgtaattccagctattcaggaggttgagacacaaaaattgcttgaacctgggaaacggaggttgcagtgagccaagattgcaccactgcactccagcctgagtgacagaatgagactgtctcaaaaaaaaaaaaataaataaatataaaagaagtctaattttagaaagttcaacttcctgatgactgctctaagacagagtggttgcaacatggaccctaggtaactcaatgatgtgatcagcgctatagaatattggctgatgttggtcacaaaagtattttggtttagagtgtgatcttgtgtcatctttctgacaataattaaataactgaatcaattgttgaggcctccatgagtatgtgacaggtatcggtagagccatgtgaccttgagtaaattgcttaatctctctgcacctcagtgtcctgtaggagagctgttctggggtatcaaagagcacaacatacatcaggtatttagtgtagtgtcaggcacatcatacaagttcattagagcttggtgtattagttaagaattgaatttacttgcagatatagaaaacacaggtaacagtggcttaaagatctgggctttttctgtcaccaaacaagaagtgtgaaggttggtgaccctgagctggaccagagacctaaacaagcagatggatgcaaggtctctgtgactctctgggcctttctctcatgtctggtcacaaaagggctgccgccgccattgcatccatgcttgctgctttaggcaggaacatacaaatctgaggtctgttcattttaacagaaaattggaaagaattggtatggaagtgttagctacagttagctagaagttatacagcagttgatcaacctagatcttcataatagccctggaggtaggaatgggaggtattatttctattttacagatgtagaaacattggccagagaggtgaagaaattttcacaatgccatacaagtagtcagtaagtggcagacacaaatttctaactcagtccttgttcaagctattagttcctaactcttaacagtgcaccaagctgccacagggcaagtctttgctgtagactcaaggatgagttttaagacaacaaataaaagcattaatggaagtcagtatcattaaatctaaatttaaataatgtgctctaacatactgggagcatctctgggtctaggtaaagaggaaagggagaggaaagcttaacaacataagaagtaaatgagattcagacatgaaaatcatccatggaaatcacccatgaaaatcagatatgaaaagcgtatgaaaatctaaagtgcaaagaaagagttgctcatgcaatcaaaactttctgtttttctttacaatgtttggggaatatagtgtgtgtgtgtgcacgtgcgtacgcgtgcatgtgtgtgtgtttgttcagatgaacatgcgtatgcctgtgctctagtgagtgcattcacacccatgataatagaccccaccatattaaccctaaccctaaacctaatcagaactaataccagattaatctttctaggttattaataaaggctcttggtctacgtagattgattttaagcaaaacttccatattaaaataggtttctttttcatatacatatacatttgatatgatttaagacattctgcatagagatctcaaatatttattttaaattttatttctagttattcactatttttagatggaaaaaagttcccatttatttatttatttatttagagatggagtttcactcttgttgcccaggctggagtgcaatggcacagtcttggctcactgcaacctctgcctcctgggttcaagcaatcctcctgcctcagcctccccagtagctgggattacaggtgccggcttccatgccctgctacttttgtatttttattagagatgggatttcaccatgttggtcaggctggtctcaaactcctgacctccggtgatccacccgcctcagcctcctaaagtgctggaattacaggcatgagttacagcgcctggacaagttcatgttttaaattgtttggatgagggcgggcgtggtggctcacacctgtaatcccagcacattgaaaggcagaggcaggtggatcatgaggtcaggagaccaagaccatcctcgccaacatagtgaaccccatctttactaaaaatacaaaaattagctgggcgtagtggcatgcgcctgtagtcccagctagttaggaggctgaggcaggagaatcgcggagactgcagtgagccgagatcacaccaatgcactccagcctgggcgacagagcgagactcctcaaaaaaaaaaaacagcaaaattgttggatgcatatacatagaaattcaattaatttttatatgttggctttggatttagcaaacttgctaaactctcatattaatactaataatttttctgtagattctcttggattttgtatacatacaatcatataaaatttgtgagtgacaataatttcatttcttccttcccagttcttataccatttgtttctttttcttgcctacaacactggctaggccacagtacaatttgaaaagaagtgacaatagtatgcatccttgttttgttcctgatttcaaaagaaaaactttcaatgttttatcaataagtataaggtttgctttggggatgtgtatctactttcatcagattcatagagttcctctctattccttttttgataagatttttataaatcatgagtgggagtcaaattttattcaatgcttttttgacatctattgggatggtcatattatttctctcttttaatctgttactgtgatgaattacattggttgattttctaatattaaaccaaactctgcgatgtcaaataaaaccagcctgataattatgttatcctttttatatattactggaataagtttgctaacacttcatttataattttgcatctatattcatgaatgacaattacacactgtaattttcctttcttttataatgtgtttattaggattttgtatcaaaatataccagcttcatattctcaggaagaatttgtataagattgatgttatttcttctttaaatatttggtagttcttaccagtaaacccatctggacctagaggttttgttttttgtttttaatggaaaagatttaaattgcctctctcagttatgaattgttataggactatttcatttttctatttcttcttgtgttcattttggtatgttgtaatttggtgaagagatttgttcatttttttctaaatttttatatttattgaccttaagtaattcatgaatcttgtttctttctttaatgactgcaggatctacactgatgcctcctttttctttcatgataccatttgtttgtgctgcttcttttctttttctttttttactcagtctcaccagaagtttgtctaatgtcttcaaagaaacaacttttagctttcttgatgttctctgtttcctgtttcatgaaggcttgctttactatttctttggttttaatttgctattctttttctgtttatttgagatcatgcttgggtgatgaattctcattcttcttttttaaaatacattttatggttataactttcctctaaatactgcttcacttgcattccacaagttttaatgtcttgtatttctattatcattcagtataaaatttattctaaattttataatttcttttttgacaactgatttttataacttttcaaatatgtaggatttctattacatttttcttataaatgtctagcttgattttattgcagtcagaaaacatactctgattccaactcattgaaatttattgagatttgtttgtgacctagcttacaaagtaaatgttccatggatgcttgattcaaaatgtgattcttgggtgatgtatagccatccagaaggtagagattgctggtagtgtttctcaagccttatatatctttactgattttttagattgtacactaaaaccccccattatggttgtagatttatctatctcctgtagtacttatgtcaatttcactttattttttgaggcaattttattaagtatatactaatttagaatttttatatattactaatgaattgggtttttttacatcattaaaagtgactctctttaactgtgtgatgatgctttttgccctaagtagtttgtctaatattaatagacatcagtcttattttaggtagcattcacattatatatctttttcattttttatctatcaacttttctttatcttcatgtttttgttttgtctcttgggttttgttttttattttttattcagcctgaaaatctttgactttagttctttgcccttaggaacatttagttcatttacatctaatatatttatgataataatttgtatttaagtttactatgttttcaccctctttttgtcccatacattttatactccttttccactcctttctttccgtcttttgtattaatttgcttattattctatctttttttgttaatttataatttatactcttttactagtctcttagttgttcccctagagtacaactgacttattgattctaatgctatatggtattatcactctcactctgaaccaaaataaaatctcagaacactttaatttcatttactctcagcttgacctatatgcaattcttgtaattttaattctatatgtattttaaaccacataaggaattgttactgttgcttaatgttattatcatccgtttaagtttactcacacatttgctattttcattgtccttcctgcctcttcaattttacttgtgggattattttcttttacctgaaaagatcaggtaaatatttgccgtttatttcctttgatgtagatctactgatagccaattatctcaacgttcatttgtctgcaaatattttttcattttatatgcgttcttcttttttagagatagggtctcactacatggcccagactgttttcagactcatggccttaagtgattctcctgcctcagcctcctgagtagctgagattacaggagcaagccaccaatgcccggcttatttacatttttgaaagatatgttacggcatgatttcttgactttggcacgctttatatttttggccagataactgttgttggggctgtcttgtgcattgtaggacattaagcagtttccttgacctctacacatgagatgaccgtatcacttcccttctcagttgtgtcaactaacagtatctcctggggagcaaaattaccttggttgggaacaactggtctactgaatatagaattctaatttcatttaacatatttaagatataatttcattgtcctctggctttcactattaccattgaaaagtaagctatatgtccaacgtttggtcttaggtactttgactggctttttttttttttttgagacagagtctcactctgctttgactggcttttaacatttttatctctgattttggtattctgtagcatcacaatgatggctatagttgtgaatttttctttatttagtttggaatttgttgggcttcttgagtctatgaatgaggcctttcacacgttttgaaaagcagccattaactctgtttttctatttaattattttgagatatacgtcacataaaatttaccactttaaagtgttattagtcagtggcttttagtatattactatgttgtgcaaccaacatcatggaattgtgtaatatgtggtctttgcgtccgggttctttcaactaatataatgctttcaaaagtcattcatgttgtagcatgtaatttcattcccttttcggttaaatgatattccattgtatggaaataccacatgttgtttatccattcttcagtttatagaaatttaggttatttccacctttgggctattgtgaataatactgctaagaacattcatatacaagtttttgtgtgaacatacattttcaattaccttggatatataccaagaagataataattgctgagtcatatagtaattctaggtttaactttttgagaacctgccagactcttttccacagcggctgcatcattttacattttcaccagcaatgtatgagggttctaatttctccaagctctcaccaacatttgttattttgtactcttttattttttattttatttatttatttttatttttttttttgagacagagtttcactcttgttgcccaggctggagtgcaatggcgagatctcggctcaacacaacctccaccccccgggttcaagcaattctcctgcctcggcctcctgagtagctgggattacaggcatgtgccacaacgccctgctaattttgtatttttagtagagacggggtttctccatgttggtcaggctggtctcgaactcccgacctcaggtgattgcccgcctcggcctcccaaagtgctgggattacaggcatgagccaccactcctggcctatttgtactcttttaaattaaagctatcttagtatgtttgaaatggtaactcattattattttgatttgcattttcctaatgactaatgatgttgaacatcttttcatatgtttattggctatttacatatcttctttggagaaatgtctattcaagtcctttgtccattactaaattgggttatttgggtttttattattgagttgtaagagttcttgatatattctggacactagatccttatcatatttgcaaatatctttttcccattctgtgggttgtctactaaccccaaatgacatgtaagtgagtaacaaataaatcttcattgttttttctttttgtttttgtgagacagagtcttgctctatcgcccaggctggagtacagtggcgtaatcgtggctcactgcaacctccacctcctggttcaagctgttttcatgccttagcctccaaagtagctgggattacaggcgtgcaccaccgcgcccagctgatttttgtatttttagtagagaccaggttttgccatattggccaagctggccttgaactcctggcctcaagtgatccacccacctcagcctcccagagtgctgggattacagggatgagctaccatgcccagcccaactttcactgttgtaagccaccgagattctagggctgttattgactgcagaataaccttattaaaattgactaaacaacttgcatctagctttgtgcgcctgtactttcccatgcagtgaggatttctcctcactgattctgggtctataaatcctcttatttggatgttggatctcctggatcgttcttctatattccttgtctttctcttctactttctaagtctcaatgttttcgcacttctctctggaagatattgttaactttgtcttctaaaccttccattgtgtttttatctcaactatggtttttttaatttccgagagagtgtttgtgtgcattctccgaatgttctttagctgtgcttatctcatggatgcaatattttcttttatttctgtgaaaatattaattataattgttagattttttttctccccatctaacgttttctccatgttagttgttacaagttactttgtttgttcatttgacttccctgttggaaatttcttcaactgtctgccagtcagttcttcagcatgggaatttaagaattcattagaagctctgagactgtagacggacttgtccactgagaagctcacagtggacatttgtaatgagccattttactagggaaacttcaatgtcagtatctttaagttgttccttatgaaactgtccattctctagagatggatctcacagtcagtctcttgtatacggagtttaggcctggctgccaatgttttgtgttttgagaaccaaatgtagaaaaatggcaagaagggaccagcctggacaacatggtgaaactccgtctctattaaaaatacaaaaattagacaggcatgatggtgggcacctggaatcacagctactcgggaggctgaggcaggagaatcacttgaaccgggaggtggaggttgcagtgaaccaatgttgcgtcactgcactccagcctgggcaataagagtgaaattccatctcaaataaataaataaataaataaataaataaataaacatggcgagaaggaaaggagagctgtcttagcatttagtgtaaaatttttagttaatcacactgttttaataatgaaactcccttcttcatttggaacaggtgtcccctagttcaacaaccaaaatttcatccaccccagagagtatacttccagctttctgttcaggtgaggagggaggatttgcccccattgaacagagctgagtatgaaatatgagtgtcaaacttctaattggactttcaacaaatcctcctgttttagacccatttttgccaccttcttccaaagcttccaggggcctgctaattgtggcagttctgcgatataatttgggttgtttcttggttttccttattgccaatttaggaccaaacctctcagttctgttaggcagcttactgttcatgaatgctattttcaactttcataaaaggaatgttatgttcttgtttgcttcctctttattcttgatggttttcaacaataatttttaagaaattcatttactgtctttttaataaaatttcatgaggaaacaaatacaaatgtgtgtgtctcccatccttaaccagaagtccaccttcttctctctttaaaattctgatatagaaaaaacaaaaacaggccaggcacagtggctcacgcctgtaatcccagcactttgggagactgaggcgggtggatcacctgaggtcaggagttcaagaccagcctgggaaacatggtggaacctcaagtctacaaaaaaaaaaaatacaaaaattagctgggcatgatggtgggtgcctgtaatcccagctactcaggaggctgaggcaggagaatcacttgaatcagggagctggaggctgcagtgagctgagattgcaccattgcactccagcctaagcaacagagcaaggctcagtctcgaaaacaacaacaacaaaaataaataaataaacaaaattaaaaaactctgtggcgagtgtatatcatcttatggtgaaatattctatgcatccaaaggcagagtgtgtcagctatagccattcattctaacaggagtgtgacatttgtagggaaaagttttttgctattcgactgctatcattgaattggatgtatgctgaaccattgaccactaggatttgtggcaacctggagatttcctgattctaggatctgtgctgtgatctgacagcatgttttctggctacatcaagtagttgtttctaggctttgttcaaatctttttcctttccctgtgtgactggctgtatctgtctctataatgccaccatatacaagttgatatggtttggctgtgtcctcacccaattctcatcttgaattttggctcccataatgcccacgtgttgtgggagggacacagtgggagataattgaatcataggggtggcttcccctatactgttcttgtggtagtgaataagtctcatgagatttgatggttttataaggggtttcccctttcacttggttctcattctctcttgcctgcctccatgtatgatgtgccttttgccttccaccatgaatgagaggcctccccagccatgtggaactgagaatccattaaacctctttttctttataaattacccagtctcgagtatgtctttatcagcagtgtgaaaacggactaatgcataagtgaatcatacattttggtgtcaaatatttcttgcttttcccatatagtacagcaaagaaggatatcagctagaggaagcaaagaactggatggatgatccaaccatctgccaaaagataaattcaaataaggtatcagcaacaagtaagatcaaacagaaataaacaagatgattccttctcctgaaagactgatagccatattgagtaaagctaaggaaagggagaatgtcatgtgtggagctcatggcagcagaaaaaagtacagacaccacggcaaagccactgaaggagatctgactgcattaatgagccattttattaaatgggtagttggcaagaaaaaaagtttattcaataagttggcaacaccaagttaaagagagaagttaagtaggtcattaagacaccacagtcactaatatttagagcttgaacatagtatgaattggttgtctacagagagttagaaaaggtgccaagacacataactgagtgatggccaatcaagggtgttttgtttctttctgaaacaaagctgggaacaatgtttttcttgttgttgttgttgttgtttttaatgtagaactggtggggtcagtaagatattgctgcccatgtctagtattttttttttaatttttgtcttaatatcatatggaggcatgctgttacctataaatttacctataatttctaaatttaaaaggaatcctcaaaataatcagaagaaaattcaacagatactattgagatctctttttgctctgttgatccatttatttcttcaatcagtaagttagtggtgctttcttttcctttgattggcaggtgtttcatcagatcttctgggatacttctagttaggagtaagatttctaactaattaaagtgaataaacacattttttttcaaaataatgtaccctgttacatagaaaacagggcttgaaaggaattgttaagaaccattcgccttattaatatgttatttttttggtgctgccaagggcattgggaacttcagtcctttgcagtagaattcttagcttctaggtgagcgtgcctctaggctggaataatttagtcacctggctttcctgtaactcttattatttttggcttcatgaggtagtattcatacagaagtggtccttttccattccccaaaagtcttttgtaggacactgataatctcttttctttccctacttgtctacatgaagtgtgcaaaaatctctggtcatatccaggatttttatacaaataagtaggttacagttaatattccagtttcgcttttttttcccaaataatttagggtttaagattgttatttcttgggttatcaggacatagctctcccttgaaactagcttattagatgtgaacagttggtactgctttttaataattctggtgaggaaaacattgtaaattatcctagagtcaaatgtgatataattattatagaaggtcactttcactatttaaaacattgagttgattatatttaaatcaaaaaagatattaaaggtgaataaatttcacatattaaaacctcaaaccacatgcatataatgctttttagtgcccacaaacaccaaccagaaagtgtgtgattaggttcactttttcaagcacctttatttgtttcctcttgattcacctaatcactttgacaggggggaaatggggagggggagcagcttcaaaaagtttccacagtggaccatgagttatttaaatccatctcacagaatccatttcccatgcactgaaagccctgtgacatttccagaactgctgtttactttgggatgtgagagatgttaaaattctttgtgtttaaaccacaacatttgtgagtggcatgagacgaagactcatggcaggttgtaagcggttgggcaacccctaccggaaggaaacaggctattgaattactggactcaagagcaggcaaatccatctggggtggcaagcccaggaaaggctgccaagaaggacttagaaccactcttcgcccttccctgcctgagtatactcatcgaaaggaccctgtgtgtctatcttcattagggcaaagagatcaaatcccaaatttcataaaggagaatgttaatgctatggttacaagcttttacacaaagaaaaatacctgctacatagacactcaaggaaaacatcttgtgtttatcaactaccttgtgcttatattttttattgttttatccatatgttttcctaaagtatggccctgaaattcactgatctttacaataccttattataataggaacagtcaaagaattattttctttctttacaaataaaaaataaaacatgaaactcacttacctaagttcatatactaagatccttcctagaaacacctctagcccttcaaccatattagactccaatgagaagaaactgatcatctttcctttttttttttttttgagatggagtctcactctgtcacccaggctgagtgcagcggcacaatcttggctcactcagcctcccgggttcaagcgattctcctgcctcagtctcccgagtagctgggactacaggcgtgtgccaccacacccggcttattttttgtatttttagtaaagacggggtttcaccatgttagccaggatggtctcgatctcatgacctcatgatctgcccgcctcagcctcccatagtgctgggattaccaggcgtgagccaccacacctggatgatcatctttcttaaataacaaaatatggtagactttaaattagcatataatggcagtaacataattttttattttgcattttcaaggccaacttaattttcaagtaaagattccaatgcatttgattagcaatatgaaagttatatccctgaaagagaaacaaattgattcatattttaaagaagccatagggcatcaatttttctagtaggcggtcaaaagtcattatatcctcattattaaactcttatccagattacaggatgtaaaatttaaattaaaagaaggaaacttttggatgttgattgctcagtattacctttttttttgagacagggtctcactctgtcacccagactgaagtgcagtggtgcaatcttggctcattgcaacctccacctcctgggttcaagcgattcttctacctcccctctcaagtaactgagactacaggcgcccaccaccacgcctggctaatttttttttttttttttgatatttttagtggagacggggtttcactatgttggccaggctgctctcgaactcctgatctccacccatctcagcctcccaaagtgctgggattacaggcataagccaccgctcccggctagtatttacatttttaaaaagataaaggaatagatctgcgcttacacatgtgtttgattttccacaaaggcaccaaaacagtccaacaggaatttaaacaaatggtgctaaagtagccagagagccatatggaaaaatgaatctaacctctgattcataccaaacaaacaataattagagatggatcataggccacataaaaaacagctaaaagcaaagggtttaaaatgaaaatataggagaatatcatcatgacttgggggtaggcaaaggtttcataagataggtcataaaaaagcaataaccataagagaaaaaaatttatatacattagacatcatcaacatttaaaacttctgctcatcaaaagatgcctttgagaaaataggcaagccatacactgagagaacatattcactaagaatgtatctgataacagcctggtatagaaacagctcttacaaaaacaaagaaacaactcaatagaaaaggagcaaaaaatttggacaggcacttcacaaaagaaggtatttgaatgggcaataagcacatgaaaaagtgctcagcatcatgaagttatcagggaaataaaaattaaaatcacaataagatatcattgaatacctacaagaatggctaaaacaagagactgataacatctaacgttggcaagaatgtagagtacctgcaagtttcacacatggttagtgggaatataaaatagtacactttgaaaaatggtgaggtaatttcttataaaactaaacatacacttaccctcccacccagtaattctgatcctagatatttacccatgataacatgttcacaaaaaaacttgtacaagaatgttcatagcagctttatttgcccaaaactgggaatagctcacatgttaatctgcagaaaaatggataaacaaactgtgatagcttcagatactggaactcaattcagcaaaaaaaaaaaaaaaaaaaaaagaagacatgaactgcttatatgtgcaacaacatagatgagtcttaaaacatactgaaagaagccttatacaaaagagtacatgctgtttgattgtatctagataaagttctagaatagataaaactagtctactgtggaaaacacaagaaaaacggggggagtgggatcgactgggaaggagtatgagagaactttctagaaagatagtgtttgtttcatttacacagatgtatgcatttgtcaaaagttagtgaatgtacacttaagatttataaatttcattgtatgtaatttttacatcaaaagaaaaactaaatattaatatctagctagtgatatgcttgctgaaggatttaggagaaattgtactgaggcctgcaatttatttttaaatattccaaaaaaaaaaaaaagattgatagagggagggagagggggaagaagagagacagagcgagagagcaaagcaaataaaatgtttatggtagaatgtaggtgttgggtatgatatatggggtgtttactgtaaaattcaacattgctatatattttataaagttttatgagaaaatgttggggaaaacaaaagtagatttttagaagaaagaaccagttttcaataatctttagatataacactcccctaatacatttcacagaattgttttccaatgggactatttgataataaataactaatttgttcaatccattaaaaaataaatcacgctggtatcttgagtctcttctagtaattgtacaggtataagaaggtggaggggaaaacctgtaggtcaaataaattaggaagtatttattgagcttttactatctgcctacccggtgagatacagagacatccaagacttagttagatcttacctgcaggggccacactctcacttggcagccatgaagaatgaagcaaaggtcaggcctgcgggcaatgcagggtaaggataaggacccacatgctcagcagtaccttcaaggccccaaccctgcttctcccctccactctgatcttctctctttctcccaccacaggtccctctacccagactctacccagagctctgtctgccaggctctcctccccggcaccaggcttgagtattccgcctcactcaccaagcctcagcccccgcccatttcctcagggacatgctccctgacccagagcagagatcacgttctttgttatacagtttcagagtacagtagtcctttattagagagcatttgattcagtttataattacatggtcactgagggatcgtttgggtaatgtgtgtctcccctactagattttcagctccatgagaaaaagaattgtatttcctttttaattctcattatatccccagcaatttagcagcatctgctatgtagaaggttacatatgaaaacacacagaaagcattgggtgtcttttttttccttcaaataggaaagaaaaagaagaagaaaacatggttataaccatatgaagctactgccaggacgatatgttaataaaataaatttaagaaaagatttgttaaaatcaaaagaggaaaaatatttgtagaattataaaatcttatgtggtaagggatattgtgggtcatctggtccacctaagcttaactatactcctgtcaaatgtatgaatatctttagtaaatatcttttgttattttacatttttaaaaataactttttatatcaaaccgttaaaaattcaaaaaaaaatcaattctccatcttcagaaactgattgttatataaagaatttagtataatgcatgattcacagtgatagttataataactactactagtaggagtattaccaggaaacctctaagttgtagtgcatcattttgataagaacatgtgttttggatcatttaaaaaaaggggattaaattataactctgcctctaaatggcaatacatctttgagcaattttcctaatatctccaaacttcagggttttttttctcctggcattcaataaacggtagccaatcatggttataatataacaacaacagtgaggatgaataagaatctgtgtttattctcaaagcgctcacagctcagcagggacatggatacaaactccaattctgcgcagtaaatgcaacaatggaagcacgccaccaagaatgagagagtgactctcaggcctggtctattgggggaggaaagagtttttttaaaaagtaattaaaaggaattctccaggctaattaagcaaaaaaggcatcctgggtggaagaacactgccatgcatgcttgctatgatccagcagagtattccaaggtgcagcatggcaggtgatgggctgaagatcctaggataccttttgtgtcatgataagatacacagatttcattctgcaagtaatgaggagcccgtgaagggttttaaaggggtaaagaaacaatcaggcttatcttttaggaaaatcagctggggagtcatattagaaggggtgagccctggggcaggaagaccagtcaggctagtggatggaagaggtgatgagggtctaaactgggaagagtagtgtgggcctggagaggtgagaatgactcatggcagttcagaaagagtgtcaacaagattgagtgatgaggagtacagagggaagagcgccatccaagatgactcaggaacactcataacttgcttggcagactgagtgggtagacaaacaaatatggttcatggttcagtggagaaaatacagaagggagctgcgggggaggtgggggtgagaggtttagttgtagacataattgaggtctccatacctgcgagccaccaggagaaaggagaagatgtcccataggcacatgggacatcagaagaactgattctgggtcagggaatcccattatggagccaccagttggttcagggaaagactgtgatgtgaaaaggggtaagtgccaagtacagaatgctggagataccagcccatgaggagacatggagacgaatcgtggaacaggcagagaaatctaggcaagaatggggctatggaagccgaaagaataaagtatttcacaaagaaggaactgagcaactatgaaaaaggtgcagagaaaacaaacaagataaagaatggggactgttcactaagtcaggtagcacaaaaccacttgtcacttttgcctatggtgtttcagtggaaagggaaaggtaggaaagatggcagtggatggagaagtagatgggtggtggacagagagactgtgatactgtaatagacaagtctattgagatggtcagttaaagaagaaaaatgaagaatatgttttaaatgtctctcaagatatctttaaatacatttgtgtattttcctaaatttgaaaaaaaaaaaagtccttaatatctgcttcatctaagcagaaagatcacctgaggtcaggagttcaagaccaacctagtcacatggtgaaactccatctctactaaaaatacaaaaattagctagcatggtgacatacacctgcaatcccagctcctctggaggctgaggcaagagaatcgcttgaacccaggaggtggaggttgcagtaagccgagatcacgccactgcactccagcccaggcgacagagcaagactctgtctcaaaaaaagaaaaaagaaaaatcatccaagggacaatttatccttaaccatacaaaacttacagcctcaagaggaagatgagctttggctactgttttctagagaaaattggtcctaaaaatcattactttgtaatgattgtcacaatttctcaacacatcttgattaaaagaaaacgatagattcctaattcaaggcgcttcatagtgccatctatgcgttgcagttacaaaatcttcaccttctagttctgttaatactggctttgcaatgtcctcacacctgttctttctcgtcctttcccacggtccttacaataaaactgtttattttttaaaaactgcatgcctttttaaaaaaaagttcatattgaaatgtcttaacaatctttatccaaaagagggcgcaaatttctcatgaaatatagtgcggtattttacaaaatgtctttgctgctagtggtatttaaatttcacagctgctgtaagttaatgcagaaacactattcctgcagcatgtgcatgtgaatcctgtcctgttgtgtgtgtgctaattaagagccttttgcttctttagaagagtttcagagcagagctaaggcttgctgaagtaaagaagtaagttgaagctaacattttttctattctgggtagccatatcaaattaagatagaatattttaaaattaaacattaagtgggggaaaagaaaacctctctgtttacaatcttctaattttaggatgtatttccattctaccacagattaaagaatgcctaatgaagttaatatagttcagactttgtgtggggttggttaatagctaatcagttttgggggggttgttggttatttgttttgttgccagagctggaaacattcataattcaatgaatacccagtatgcacggctcttcttgcgtacaggaggcagtatgaattgcgaacagaggggatcaagtgaattctggtctcagctattactgtagcttgagtcccaccataatttgtgtacgttttctgatggggatgatatgccaaaaaggtgctgaagtagaattgggtgtcataaatatgaactatgcaaatggaaggaagtgcaaagacgaaaccattttttcaatggtagtaatataccacaagtttcccttacttaacagaaattcatttaaccaaattctttacttgaaatatataaattagggtaccacttcactccacagaatggcatttccaaatttgaagtcctgtgcttattcttgcttctgtaactggcttgaattccaaattccaggttttccatcataactacctgcctggtaatttgctggggtgcggtagccatgaacactcacccacgagtaacaaacactcaccggggtaatttggattggcttccagcccctaaaagtgaaaccaattataagtagagaatccctgaaactttatctgccaattgataagcactggtggctatcaactagaacccaaaactacatccttcagtggcaacatacaaacagcactaaatgagggcaaatgcagagctaaattcatagccctttttatgcaccagtctaaaacaacgttgccaagaagatctgcagaaatttttggtagagaaccaacatgacaacaagagccaagcattatttccagctttcatttgattacaaatctgtgacccattgacaaactgtttatttcttttttttttttttttttttttttttttgagacatgcaatggcacaatcttggctcactgcaacctctgcttcctgggttgaggcgattctcctgcctcagcctccagagtagctggcaccttacaggcgcccaccaccacgcctggctagtttttttgtattttttgtagagacagggtttcactatattggccaggctggtcttgaacccctgacctcatgatccacccaccttggactcccaaagtgctgagattacaggcatgagccaccacacccagccaacaaactgtttctatgaattaccaacaagcattcatacctcctctccatatgtgatgatagagtgatatcaattgattcatcatattgatttcctcttgtcagtggccaaacctgccttcatcacgcaccccatgcagctgcaaggtcaatgtgtgtgttcgctctgaaatcctcacgctgcatcttggccagcttcctcctttcctgaccataagatctgatctcttcttctatagggtagagcctggatcacattttcttttctgaatttctgaggccatgactcctcctcttcctctgcctattgctatagccaacaccgttgtcctgctgtacccgcttatggcaacaaccctaatgccttagattccattcctgtagactccacagagaaggcgatttttaagtactcaagttgtttgataatgctgaactttgtaacatttctctctttttttgagatggagtctcgctctgtcgctcaggctggagtgcagtggcacaatctcggctcactgcaaccaccgcctcctgggttcaagtgattctctggcctcagcctcccgagtagctgggtttacaggcacccgccatcatacctggctaatttttgtatttttgtagagatggggtttcaccatgttggccaggctgcccttgaactcccgacctcaggtgatccacccaccttggcctcccaaagtgctgggattacaggcgtgagccaccgtgcccagctgaactttgttacatttctaaaacattttattgctctccaagaatagaaaccagatcaaatgtttgaggatagcaatgtaaaagtagagggtacaaaggaaccaaagtcactggactcttaaaacaacacagaagaaaaagtgaggatgctggcattacaattggattgtgaatctgttttcaccttcagtatttatattgagacatgtgggaatacagtattgtttcaatatgccttctctcaaatgatcattttttagttggtacatgactaagaggtttgctatattcattggagtaacattcacgttctgaattaatttgcttagaagatgaatctgactttataataaaaattttaaaggagtcaattagaaaagagcagctggaagaaagttgttgcattatttaagggcttgaataatatacaaaggtaagttagtaataaaaagttaattacaagatggctttatttcttattgaaactgtattttctacctttccagaatattgtcctgagaacacttacatattccttttttttagaaaaactgtggaatgaagaaggcactcattattttcagctcccatagttataattctgtttctatagaaatttgcaacatcccatagagtacagtattttattcagctttcaaaagataatcttgaccctttaacacatgtttacttttggctgggcaaggtggctcacgcctgtaatatcagcactttgggaggtcgaggtgggcagatcacctaaagtcaggagttcaagaccagcctgggcaacatggtgaagccccttctctgccaaaaatataaaaattagcctgacgtggccaggcgcggtggctcacgcctgtaattccagcactttgggaggccgaggtgggtggatcacctgaggtcaggagttcaagaccagcctggccaatatgatgaaatcccgtctctactaaaaatacaaaaattagccgggcatggtggtgcatgcctgtagtcccagctacttgggaggctgaggcagaagaatcgcttggacccgggagatggaggttacagtgagctaagatcacgccactgcactccagcctgggcaacagagggagactctgtctcaaaaataaataaataaataaataaataaataaataaataaatattagcctggcatggtggcatgcgcctgtaatctcagctgcttggtgggggctgaggcaagagaatcgcttgagcctgggaggtggaggttgcagtgagccaagatagcaccactgcacaccagcctgggcagcagagcagagacagactctgtctcaaaaaaaaagcttacttttaagaactgcttacattaattacaaaagaccactttttagttgttaatatgcattaggtaacaaatacttggcatatatgcattctttgaaaatatcagacaaataactaaacaaaattgcatgctagttagtggctcggactgggaaatgagaagtgatgttaattcttaacgttggctacttttgtcacctgtaaaatatgatcaagcctgttagtctaacttaatagcttgagtaattgatatagggagtgaagtttttttgggggttggggagagacattgcttttttccactgacactgacgataccagtttactactatgtgacactttttgcttgaactagaagagataagtagtatttttcaagttttgaggtttgggtgttctgctcttgtggacgtgtcatgtttaataaagcttgttcacaactactggcttaggaagtggcttgcagttgacaagtatgtgacttggaacactgggtggaatggccacgtggcccagtggcccagggcccacactgagaatgcagcagctgtgcatgctaaatctggctctgtcattaacctgccgagggaccttctacaaatgcttaattccaaccatgaaagcaaacataggcaccgatgcttgagaatagttgtaaaggaaatcaggccttgtgcagaaaataaacggaactcgtctgcctttcctttctaacacttgttggaggcagggaggaattcagaatgaccaggctgcaagttactgttctttgcttctaattaagaggcaactatacgcaagtgagcataattaggagaaactggggcagctggggcaagtatgggcaaaacttaagccaactttgaaaactaaagggcaaatctctggagtagtgagaaagagatttctccctggttccctctcttgctagctgcatatgtgtacaatgaccccatcacactctgcgtctgagcctccctctctttctagtttttttctgtttcccctgttccttcttgtttttcctttgtttgcactgtctgaaggggaggaggagacaatattctcccattgcattttttattacttcctctatcactagatctaggcagagcttttgagacttgttttgacacactcactttttttccacactcactttttagacgggaaaaatgggcccaatcaaatgtaaatgaacagcaaggtagtgacagctagaatagatggcaggtcatttaaatgccagtccagtgctatttccatacattgcacccaagtttaatgattaagaacaaacaataacactcccaaggctgaactgaccttatatttttcatatgtaaaaatgtattctatgtttgttacctcacaactatgttagtccattctcacatagctataaatatctgagactgggtaatttataaagagaaaaggtttaattgctaggttttgcaggctgtacaggaacatgatgctggcatctacttggcttctggggaggcctcaggaaactcacaatcattgcggaagatgaagtggaagcttgcatgtcacatggtcacatggccagagcaagagcaagagagcgaggtgggaagtgctacacatttttaaatgaccagatctcacgagaactcattcactatcacgggaacagccccaaggggatggtgctgaaccattcgtgagaaatctacccccatgatccagtcacctcccatcaggccccacctccaataccgggaattacaattctacatgagatgtggtgcagacagatccaaaccttatcagcaaccacaggagttagggcaggtggaggatgtgacagcatttaaacaccattatttcatgtacatggaattatttgatgtagagtatgaatgtatgtacttcgaaattcaacatgattttgaagtatatccacaagtacggttcatctttggcccagtttggccagaaataaaatactgcactggaaatatgtatgctacattcactaaataattttaaaatgagagttaaaggtcataatcatagttatgaacatagatgccaaagcgggtgaatcacttgaggtcaggagttcaagaccagcctggccaacatgatgaaaccccatctgtactaaaaatacaaaaattagctgggcatggtggcgcacgcctgtagttgcagctactcggggggctgaggcaggagaatctcttgaacccaggaggcagaaattgcagtgagccaagatggtgccactgcattccagcctgggcaacagagctagactctgtctaaaataataggaataataataacaataataaagacatagttatgaccatagcaaacaaataatggtaaaaactcacactcacatttgtccagtgagaggtaaagcaaacaccagtatatatggagatgtaaaatccaccctttaggctgggcatgatggctcatgcctgtaatcccagcactttgggaggccaaggcaggtggatcacctgaggtcaggagtttgagaccagcctggccaatgtgttgaaaccctgtctctactaaaaatataaaaattagccaagcatagtgtcacatgcctgtaaccccagctactcgggaggttgaggcatgagaattgcttgaacctgggaggcagaggttacggtgagtcgaaatcgcacccttgcacttcagcctgggcgacagagcgagactctgtctcaaaaaataaataaataaaatccacccttttgagaagtcttctgccctgagactgagagtcagccagagcttttcaggtgctaagtaacaaagaatggtgccatttaaaataggtggaagtgtggaggtacataccacttagggcttagcttgattttccctaagccagtgaaatacaagagtcttgaaagtcagaagtaattggctgttaggaaaaagagtaaaagaaactggtgagtctaatctgtgagtgaagttaccatatacctattccaggtagcaaaacaaactaaaagaaaaaaatactgcattttccaaaattcataaaatttcccaaattcataaagtttatgaatttaggaaaatgcagtatgtttttctattagtttattttttctattagtttgtttatgaattaggaaaattcataaatttcatttctaaaattcatatttaggaaaatgcagcatgtttttctattagctcatattttctattagttcatatatttttctattcctttcatattaatattgtgtgattccaaactatctgtagaaaaattgtatagtgataaacatttatatacatatatgcaatcgattgtaaaagacaaaaaagcaattatttgaggattaatttaattgtttaaaatataaactgacaaagccttatattcataagattttaatttgaaaggatatgacattccttcttcatgtaagaagattatactcaaaagagcaaatacaaattagacatttacagtctgtttttgagagttcatgcttaacattctaccaatcttaatcatatatccttttttgactaataaaattaaattcaacaacatttagcaaatgcctatagtatacccagttctataatatctattatttaatttgttggatcctctcaatcacatctggaaattaatatgaaataataaaattgtattatttgcttttctcctctacagtatatgaactctagaaagtcaagaataaacagagtatcattcaggttgcttaaccaaatttcattggctgctttatttagcatgtcaaaaaattacaatataatctttcacatggtgttttgattggaaataaaacatggcttaactctataggattacatatatggatgaattgtacggtgggaggcagctgacatagggcatgtttgtttgtcagaaagatttatgccagaaatcctagaggtgtggcagttatgataatacaggcaaaacatgacatcaactttgttctttagatgtttttattcattctttacaaaccctaaatcatagaaacagctattgctttgaaccacaaagagaggtgtgtctgttatcagtctgccatattatcagcatacaattccactgtgatttcctttctttttatgttactattcagaagtcatgtatagagatgactgcatgaacctgaatcacgaagcctcctagtaatacacttgtaaatattttactggggagcataaatatatctttgaggagaacctagatgaaatagggtagttttcaactttttttttttttgagatggactcttgctcttctgcccaagctggagtgcagtggtgcgatctcagctcactgcaacctccatctccccggttcaagcaattctcctgcctcagcctcccgagtagctgggattacaggtgtgtgccaccacacccagctagttttttgtatttttagtgaaaacaaggtttcaccgtgttggccaagctggtctcaaactcctgacctcaggtgatccacctgcctcagcctcccaaagggctagggttgcaggtgtgagccactgtgcctggctcaacttttaaatattattcaaatcttgcttctaattcagatttttcttcagcatcaaactcagataatttttcagatttatacatttttgaaaaatattgataacatgcaaaatgttattccaattgatatactacttcagcatatactttatgacctaatgtgcattaagaagtcacttttgagtccaggcacggtggctcacacctgtaatcccagcactttgggaggccaaggcaggcagatcacctgagttaaagagttcgaaaccagcctgaccaacatggagaaaccctgtctccactaaaaatacaaaattacccaggcatggtggcacatgcctggtatcccagctacttgggaggcaggagaatcgcttgaacccggaaggtggaggttgcggtgagccgagatcgcgcctttgcactccaggctgggcaacaagagcaaaactccatctcaaaacataaaagaaaaaaagtagtcacttttgggtcccagtttcctcatttgaaaaattgaattaggtaacttttttaaggtcctttctaacttcagcattctagaaataaaaatatataccttagtttgatgtcctttaaaataacaatattttttatggctatttaaaaaccattggtttttaaatattttcaccagaaaatgaaataaacatgagaaggagcgtccacagcacagtaaatgatactcactgcagaacgtccccaactcaggatggcagggaagaagggtgggtgctcactggcagaacgttcccattcaagtcactgggctagctccgtttggctgagagcacgggccagagctcaaagcacgcagaagacagatttaagaattctctaatgaagtcttcttactgtgtgtgtggactcaaagaaaaatattccagacccaaactaacacagtgagtgagccttgctcaggataccattaaacagcatattattgaacttcaattcacttactgcaagatctagacatatacagaaatgaagtaaggaaactaggtaccctgttcaaataattctgattataaaagcaattttcctgaaaataaagttaaatcaagttattcagaactgtcttaatgcattttgtgcatgtttgttcacacgctgtagatattgactgtactctgtacacaaagagttgtcttggtgggaagcaacttctcacaaggagtggagactctagaactgagctggcacattgaaacctcacctccaccaccttccagagcaagtgacttaatctctctgtggttcagtttcctcttctgtacaatgggaatgaaaatagtaccccattgcatggagtttttattaaatagtatctattgcatggaattgttaaaaggtaccaagatcagtgtttattagatagaaataagagaatgcctacattttgaagaaaaaaaactctcaaaatgaagcactagcttataggtatgtttttgtaagaacatgcatttttaaccctgaaataattcattttaaacttcctctgattttccccacaatgtgagccacgtggtaacttgggacttctgagtagtttggaataaactttgcacctgctgtattgtgaggactagagagaggagcaagtatctgcatttggtaacagacactagactgtattgcttcccactccttacacctagtcattgagaaaactgagggctatggaaatcattcaccctgtcctcagtgtcctctgctcagcttctcgtcccagtgctgtctccccttgatttcccacttcttctcttctttatctttatttcttgccccttgcttttctctttgcagtttctgttccccttactctctctgccttatcattggtcacttctttcatttatttttacttttttagagacaggcaggctggtcttgaactcctagctcatgctcccaaagagctgggactacaggcggctggctaactttttttttttttttttttaagagatggggactctccctatgttactcaggctggtctggaactcctaggctcaagtgatcttgctgcctcagcctctggaggggctgggagagattacaggcacccagctgttcacccttttaaatttaactgtcctccagttttatttctcactttcctttgcaagcgcctcactcccaaccacttttgctccccgggactatcctctgctctgacttcctggtttccctccctctgccctcactctgggcaccagccccttccatgttggcattcgactccacactttctgctttcctactttgagatttgcaatacacttcagccttattcacttactgctgttagcctaaccgattaataccatttttatgaaaaaatgtaattgtatctctttaaagagacacaaggaaatgagaggcatgaatgaactgaataatattcattatttactaagcatccactacattcctgtccttcatatacattgtctctattcttcacaacgcctttgaaagaagctgtcatttagtcccacgttatacttgaagaagtgatgctgagtgagattaggtgacctgtccaaggtcattcagaggtagaattttatctcacatctttctgattacatcatctaccctctgtccgctatatctccctgactcttaagtgaatgaaagtaccatgccttatcacatttctcctaaacagaaggaataagtgacaataagtctacatgtagagattttagattttctccatgcactgcctctcacatacacatctatacagacgccacctttaaatttaacaaaggagggaggcagaaagtgggaataaaacagtaaagacaccaaaggaaaactgctactctcctctccttgatgttatctgtgaatgactaagttcattaggaatcctagactcaggggtttttggagttgaaagtggtctcggaagatatccagaataactcctctgttttacaaatgagggagctgtaactcagagacataaaatcacttgcccaaaacatataaattaacatactgccccgacctgggtgggaggttatattgatattcatcaagtgcttatggacaaacaaaatgtacccaacctgtctacaagccctggaatgttctagcatcacagagtgagagtaattccaggctcgaagggtattcctgctggggcccaaaccttacccctccccttcaggggctcaagaggagtctactaagataatttagaattgggaatgagtgtgtttcaaatgaatgcatgaaaaacaaatccacaaggtatatggcactgacttgtaataggcccatagaaatattctgatggagtacaacttcacaggttgccaaatgacagaataaggcaactgtttttatagttataatttgcaaaaaaaattatagatatatatttatatatgaatggtgatgcaatggtgagaataactgttcattctgtaactattcctatcactctgtagctttcatgctaagtagattacaaatatcattggatttgcataagcattaagataaatgaaatgttagggaaaatggaaggaaaaagaacacagatatgctcttttaatatcttggtaccggcattaatgtcttctttaatgtgatgtaacaatacttggctcctgggcagttgttttttttagttaataccgtatcatcaggaattcagtttcttcccacctgattagcagcacgccacctcactggaatctaggaaggagctaatgtatactgaaaccaaatctgatgcttagaaaatccttgagctattgaaaggcacacctgcgttgcttggtaggtgtactgaatctcaagtaaggaatttctgcaaatctcctgtttagttggctaaactggttttcactcctattgaacaaccccagggtgggggggatcctctatttctctttaataaccataataagccaaagaaataattttcaatgctaattccagtgacttagacctcaaaagtagaaaggctcagaatatgtttgagggcattgtatgtcttcgggtcaaatttatagatcagttagtagttttcatattggaaaagatctatagctttttgtaaagactaaactattgttaactaagatgttactttgaataatttagaggaggcaaccttttttgatgtattcacttttatatttaaattaagaatagtctcttatgaaatttcagtgaactgaatcctaaagaaaataaggaagcatttatcagtcgaaagtactctgtaaatcggcttgcagattaactgcaaaggttatttgggaactgtataatcttaaagcaaaacaagacatttatccattacttcttttcaaaaatctctatttggtccatttttattttctggacattctttttttagattatatgctactccataatatctttagaattctcctgacaaaactagcttgagaagcataagatataagacattctaaaataaaaatgtttgattcattacataatattatctaggtattaaagaaagttaacatttttcattctttggtcaggaactcatggcctccaacatacagctttccacagtaactatgtagtacatcctagggaagataaagaaaagagtttagggttgtccaacctcatagaaaggagaaaggaaaattaaccaagtccacaggcatgacgaccctagtctgttttagctgccaaaggaactaataatgctgccatttaagttttaatttatggattgtttgtggtgtttcccatcccttttaagttgaaattgtgtgttgcaatctctacagtaatagaatatttcttttttcaaagtattcaacaatgagtttaatattctttcttcctgtgatgcataccaccatccgttatgctaaattaactgtttatacacacatacacagagctcaactggtcagagctgtggttctcagcctgagtccacattagaagttttggaaatactgctaccaaggccacccccagagattctggcttcactggtgtggcgatgcggcagagagaagagtgttccaagcaggaattcagaatttgtttcttccggatgctatgttgcaacggtaatctgggcttatggatttttgaagtataatgggtagagctacattatgtgttaaataaactttgcagactggtttaaaacaccaaaccattcttcaaagttctttctttaaaacaaacaatgtgcctttggatccaaacagtggacttcatagcaactaggtgataaattaggaagtgcttgagtcttaaaggtcacagcactacacttgttttgtggcaaaagtaagtcagggttttgtctagtaaaaacaaagaaataatcaatttagtgagtatctaccataggcgagccacggtaaacaaagggactatcgaacaaggccaggaaataaagtattaaatttgtgtaatttgtaattttagaaaaatcagtaagaaatgttatggttagtgggttttgtgtttttcaaatagtaattggatcagaaataggcagattattcaggaaggaatatggcatagaaataatagtggaaatatgctggagggcaaaaaaacagatgataaaacactttaaaaaggcaagccatacaaaagaatagaggatgctttgtagtcattgctcaaaggtgactgatttgcatagcaaggagaatgagaaggaagaggttaggaagatacttttttttttttttttttttttttttgtatttttagtagagacgggatttcaccgtgttagccaggatagtctcgatctcctgacttcatgatccgcccgcctcggcctcccaaagtgctgggattacaggtgtgagccactgcgcccagccagggagatacttcttaaactcagtttttaagtttagtttaccagtgaacctaacatgatacatcaggacaagctggggttcagagcagaacagtagggtaaccatgtctgcattgtcacccttgtacccattcacgaaagccatgggaccattaagcacagagaagcccactacctgccagccgctgcacggctgcaacaagagtaggacttacttcgtgttctcagagcacagattacaacattcgggtagacattgaagagagacagatttggggctcaataggaagaaaagcttttttaaagggctgtcaaaacaacatgaagaaaaacagaatagatacgttgccatgcactgaactgctggtcctgaagggtggagcatgggctaaacattatctctagaaatagacaggaacattgttttgagtgtggagcgtgtcctgctggtctacagtgattcttccaatctaagttttgatgattctatgtccagcttcctctcttctccagtcaccttgtcgcctctaatttcactgggcacccatttggttaaaaaaaaaaagtgacaaagggaaattaagaaattcttcacattgaaccagagtgtttctgcctaaagatagtgacacagagggttagcacgagatttatcacagcagactgattgataggttttagacctttccttacttttggcaacaagtgaaacctggaagctcataacaaaactgcaagaacctttaagtggacaaataataacccgtgtccttgttctctcatttatgcccagatttgtggcctcaggagccagaagtacaccttgatctttatgtttaccttgagacagcaatgaagggatgaaggaatgaatgagtttatatttcaattaggcgtgagagatggaggtggtttaaaaaaaaataaaagacaagatagcagttttgactgggataacagcatcctttcatagaatagcctctagacctggaagctggaagggacctacagggaaaatgtgttgaacaaatgccctctgcgtagtgcattagtatgagtacaccagcaagatcaagatcgtcaggatgccccatctgctgctatcttgactttaggcctgtgccacgcaccgttttgccatgactttccgcatagcaccaggccaaaaagaactgcagagttttgagggcaaggccggtttccagcccagaatctgcaatgatccctccttgacaagtcaaacagagtcacccaaacaagcgtggcacgcaaacctttagagttcagcaaaccgagggctgagttaccaaaccgtgtcctttcagggcatgcaaaaggcttttcctgctctgcttctacaaggtagtcaggaagccaagctatttgccttgggtagggctgggtgggggtggtgaggtgggggcgcagcaggttgtccacacccggttgccagtctgaacctgagccgctccaacaagcgagcccttctccgcggccctttggctcaggggagcgcaggccggccttcctcccgcacgcgggcgcgggccagctgcagatggagaacccggggggcgaccgcgagccctctgaggcccctcaagggacagggcatgggtgtgaggggtcgcgtgcgccccctggcgccgggtccgctgggcggggtggtgggcggggacggtgggcggaggcggaggcgggaggcggagccccggggttgggagtgcgggggtcgcggcgcagagtgggagccggagagcgagcgcggctgcagccggcggcatggctagcacggcttcggagatcatcgccttcatggtctccatctcaggctgggtactggtgtcctccacgctgcccaccgactactggaaggtgtctaccatcgacggcacggtcatcacaaccgccacctattgggccaacctgtggaaggcgtgcgttaccgactccacgggcgtctccaactgcaaggacttcccctccatgctggcgctggacggtctgcatccccgcggcccccgccctcagccctccttccttgatggccagcccgctaggcgccctctcgcccccaatacccccagcgggacccctagactggactcctctgaggcccgacccgtctctcccaacagggccttagggagccagggacgctcctggtgcccgccctctcctgatggctgtctcgcggggcgcctgttcgagcctgggaccccgggaggggggacacgcagacaggcccgggttggtgactcccaggcgtcgggggatggggaagctttgcggtcctgagagtcaaggaagcggctgccctcccccaccccccatatcttggggaccgctgggacccagagttcatgctgcaggggcttgtctcctccacctccctcccctacgttccccgaaggctgggttctgataaaaatggtgtcattgcaagccaaatccgtttgtcctgacctcccttgagccatttcgttggttcttttaaaagtaggcgggggtgggggttgagaggttggaagcgggaaaacatattgcagaatttgttgttgttattgtttccctttaaagagcttctacaaacttgtctgcctaggcaacactacaaacacttcctccgagttttaggaaaataatagcccttgcggtgccgcgatgagtccgcagagggtagggaatcttgggccgtgagagcgtggcgccgggagctgaccagttctgcatccgagtccccggtgcctgctgctgtcctgggttgttcctttgtggaggttcacctgcgttgctctggttagtcaggccttatgctggtagcagctggtggatattcacacagaactctggctctgttgagtttcaagacaacagccgatgtcagcccggtcccattgattgctcaagttctaggcccgttgcttccaggattttacagcaaacgaatcctggcagaaacttaagaggagttatttacattacatatttctagatttgaggtgtttttttcttttattaccgcacttgcaggttttgtttacatagctgggtaaatgaaagaaaatagttgattcctctaagatggggtttgccacgaagagcaaactgttgctcaacgtggtatttgatggaacctccgtataaggaatacgcatctagttttagaagggtggcgcccgggtccgtgtcctgttcggtaaaataagcagccggaacagtgtttattccccagcattaccgttgaatttcctgtggtttgtagagcacgcatccaggtagatgaacaggcattctcttgttcctgtgatttatagtcagcaatgtgttactgtcctctgaacactcttctgttgtaactctattgttctctgagatagtgtgccagataggtacgcttccttctgtaggacagttgggggacaagggagagaaggaaatgaatgctctatgaatattattaagtgcagaataataaagttttctcctacatgtctgcagtgagagtggaggtggtaccatacctgtttgggggcagatcgggccgggagtgaagaggaagtaggaatagttgtcctggttagctgggaggagaacagagaggagtgacatttttatgccatccagcttgcaaaatggccttcctgtgtgctcatgtgactaaaaaatgacttttaaaaacataaatggcatgacactacctactgttgtacaacactttaaaatcaatgtatttttccaagtcagtacttaatagaagtgacttgactctgtgtaactgctgcatggtatattcattagactgcataaaatggcttagttaaccatagatccattgtggacattggaccttttccagcttttctttgttggtggtgctttactgaaaatcttatattcacctctttgtatgtgtgtgtatttctgtagactccattccactgagaaatggtatcgtaagagcagtagaatacacgtgcattttaatattcagttcatactgtcaaattactttccactgacagtgtatgagaatacctgcttctccacattctcaccactctgtgttaatccagttttttttttttttttttttgagacggagttttgctcttgttgcctaggctggagtgcagtggcacaatctcagccgactgcaacctccgcctcccaggtacaagtgattctcctgtctcagcctcccaagtagctgggattacaggcatgtgccaccatgcccggctaattttttttgcatttagtagagacagggtttcaccatgttaggctgatcgcgaactcctgaactcaggtcatccaccctcctcggcctcccaaagtgccgggattacaggtgtgcgccaccgcgcccagccatcttatcattttagttggcatttcccttattgccgtggtcaaaatcactggttataaaaatggtcaaaactcactgaccgtttttttttctcttttgtgaattggcatccatatcttaggcccatggttctgttgtttctttgtggtttcgatgatttgtcagtccttgatttgttatgtaggttgcaatctcacaccattgttcatcttttaaatttatgatgccttttctcacacaggactttgaaatttgtaatagaatcatatttatcagcctgtttttttgatgactttccttctgtggcttaagatggcatttcttaccgcaaaacaaacttacttttctgtatctctcagaataacatcttggagggttaaatcatgcaactgtgttttcctgtggaggggagttgattcccccacctgcaagtggaagcttccagggtaggggccctctgtttgtcctctaccttgcattcccaggtcagccacatctggtgggtgctggtcctgacattgcctttggagaaagtggccatggtggcctgagtggaacagccctccccttaaacccaggtatgagctctagattgggaagagaatccaggaagggagagagaaggctcgtgactcttgcctatcttgtgttaggtagaagaactcttggagtcaaacgacgaggtcattattctgaatttcttttctttttttttttgagacaaagtttcactctgtcccccaggacagagtgccatggcatgatctctgctcactgcaacttccacctcccgggttcaagcaattctcctgcctcagcctcctgagtagctgggattacaggcacccactgccacacctggctgatttttgtatttttagtagagacagggtttcaccatgttggccaggctggtcttgaactcctgacctcaagtgatctgcccgcctctgcctctcaaagtgctgggattacaggcatgagccatgcgcccagccctaaatttcttatataaagaaatctctgattcccctcccctaggggtatcattgccacttgttttccttataagaaaaatgaggcctagcaaagctatatgtctagatttaacgttatgccatattaagaacccagctctaatttctgcttagaatccattgtagtattataatatgacgggatgctttgatgactttcttactgctcagcagacatccatattattcatcctgtgaaggaggtgctgccatccctgttttacagatgagagaactgagcctcaaagagattaggtcctataaccaagtacataccttgggtaaatagaagcaccagaggtgaaactcagagttcctgccctccccataccactgttctctcaaaggatttgcagaagtacacaaagctaccaggaaaagaaaagcacattcttttttcccccctaaatccatcaactagcacaggtgctattagcgaattgtctccaccaagtggatgttttcgttttttgctgatttgcaattgaaaataaagtacacataatttggaaaacacttaacttttaaggaacaccttgaagctttcctccaacagagttcattaatttaaagtcactgtattttactatttgaaaatttcacagctgaatgagcttgtgatttctgtttattgttaacccatactcctttcaaagtaccacttgaacttcagctgagtatgattttcagccagcttgtttttagtgtatgccatctatttttgctagtgggaatgcttgccatttctcccaggagaactaactataaattatacttcagagaacttctaaataaatatgttcatgcctcagcaccttaatgtgttaattagctattaacagtgtcagtaaattagacctgtcaaaaataatggcctccttgactaggtttttactaacacttctcctggtggtgttacttgtaagttttgccctcaggaactgttagaaagcaaggctgtagaggtctgctttgcaaaagatgaactctgaaagggtttgttggaatcatcttggctccaatctgtgggtgttgtaaggactggtagccttagaacactgagaatttacaaatctcaggcttacgagcaactccattacatttatggctggcaggggagtttatcccctgctctttgctctccatttcagaaaatctggccaatgatcgtccttgtaaattgccttctttgtgcatgcgcaaaattaacaagttatggctgctgttcatgctggagaaaggtacctcattttccaaatccgggttctggttggcacaaaagaaggacctgaccagatcagaatctgccctgcccacttctcctctcatgcttgtgtcaagagaccaaagtgggtcctgctgccaataccagggctgggacggggcatctcagagtgagaaactcgggaaaaatgttatcagtggtgattacataaagttcaaagactactgttattttccctgttgtattaagaatcgaatgggttggcctgggattctacccactgtttatcatctgggaaatgcattccgcgttctaaatgaccagattgtagaatttaacctttggtaaattcccgacaacttgcactttctgttaacaaagcatggaagtaactaaaggcaatgcaaattagggtacatgctaatgttttctgggagtatatataaatggatgagtcccccatttttttgtttatttaatgactgcagtcagagtcagctataaaacctcaaaaccatagattaaaatgaatttcacaaaaagagcgaaaccacactgtccgagtagccctggtggcaagtgatgaaccagtttgggttatcctcacaggctctcttcaaacttgcaagggactgacaggcttcccctctctgtcttgcctctacctgctgtctgggctctggctggggagctcgaggactgaagtttaaaatacagctggttcagcatttggcagcggagacccagatagccctgcagcacaatgattgctatgaaagaagccttcattatcctgttttgctaaaaataagtttgttttgctgtttttgatagccacggtgttagtgaaattgttttctgtatggaaatatttcacactacacaatggaaggtcactgtccttgcagtctgcatttgtgggagtctaaagtgtttacaattaagtagagcagctcctgtttgctcttcaaaaatgggtccaaggaataggattaaaacttcaatttcattcttttccaaagaaacacagactggggccaggtgcagtggctcatgcctttaagcccagcattttgggaggccaaggcaagaggatcgcttgaggccaggaattcgagactaatctgggcattacagcgagacactgtctctataaaaatttaaaaattagccataggtgggggcaagcgcctatggtttcagctactcagaaggctaaggcaggaggatctcttgaacccaggaatttgaggctgcagtgagctatgattatgccacttccctccagcctgggtggcaaaagtgagatcctgtgttaaaaaaagaaaagaaaaaaagaaactgaactggaggccactagtatgtactccctaaattcatgattatcatggtctcggaattattatttatcatggctctgcttgaacaccaataataaatgacttatcatatattgacacataagaggttttttccagttaaaaagtttaattccaaacgtaaacctgatgtaggtatatatgtttatttgcttagcagatacttacttacacccggtatgtgctactatcactattttagatcgaaatatggcattgtttcaggctgaaatgaaaatggcttatgtggtaaaagcttattagtttaaaccctgttaatgtaaaaacctggacaaaagccacactgaagtttaccgtgtaccctggctgtgcaaataaaaatacatgactaagaacatgaatagcacaggaaggatgaacaaacgaactgacagaacatactcgttagggtactttaaaggcattcatttataaaagaacagttgacttaatcactataaattactcttctacaaaatagtgctttttaaaacccagttttattatatacaccctgaaaacaatagtacttcactaaagtattcccttagaccccccatggttcatgatgatattccagttagtctgctattaataagcgtccactaatattggaaggtttgaccctttggatctctttctgccacccagttataaatcttatcatttgataatgtcaaaaccattaaaacacccttttaaagtccaatgagcggaggagctacagagttgtgatggtggcagatgatgttttttcacagtgaaaggcacctttcactgtggaatttcactatatggaattcgtagtctgatttgggatggaatccatgtctgccactttctaactcacctctggtaagtcacataacctttgtgtgcctcagtttcctcactggtgaatatggaaataacactcagatctatcctgaggattccccataaaccgcacttcacagtgtgtgacctagaataggcactccctgtagattaacttgctttcctttcttgcttgtcttgccacatgttttcaccatcacagttatctttttggaaaacaaacatccagaatgacaacgtaaaatgaggatttctccctggacagccacatgctttatgtaacgtaaatgacctactctaattgcaggttatatacaggcatgtagaggacttatgatcgctgctgtcagcctgggcttctttggttccatatttgcgctctttggaatgaagtgtaccaaagtcggaggctccgataaagccaaagctaaaattgcttgtttggctgggattgtattcatactgtcaggtaaatagtaactttcttccaaacaaggtacttgatgatgttaatgaaatcacactaaccatagtgctttccctctaatatttgttagggctgtgctcaatgactggatgttccctatatgcaaacaaaatcacaacggaattctttgatcctctctttgttgagcaaaagtaagtactcttctcagtctgtttccagctcacaggaagtgtatataaattaatattctcaaccaagagacatgaatttcctatatgacttttgaaagtaagacatactgataaatggtaactgatgacatcattcaagattaaatgtgtcatatgccacatacgcaaaatatgcatttaattagtttgctagtgttgcagtgtcttgtctcgaaacagttcaaggcatcaaatttagaactataaacttcatcgtttgctgtacatcatgaaactgaggtcaagtagaggaaacgtgaaaggtgtcagacggagaggaaagaatgatgcggtgtgcgaatagaaaattaaaaccttgccttgattgttgcccactcaaaatgatatttgccagatgctagtttctgggtcttttaaatttgctgtattaactactgtcttaacaagctcctcctaataaacctttataaagaaactgtatacgatgcaaggtttttgaaaaatgctgtaggagcacggcacctttacccaaatgtggctggtcagtcttgcagatgaatgctttggaattaacagatcagtttgcttgttggtgttgtttttaaactatgggctgttgctttttatagtttccctaggcttatttctttggattgggaaaaccccagggataccaaatcagaattaatatattaaatattttgtcttacctaagaatgtatctacatccctctttaggaagcctcacgtacgtgtgtgtgtattgctatcaatgaggctggtaattttattttagacttcaggtcaaattttatagaatttttaagaagtatattactgaaatagctggtcagctgggctttactttttttctggtggttttaggaatcttcaggaaattgattttctagttctggcttaagtgtaccttacgcataaacagtaaatgcttatatcatgaaataaaatgaaaataatagctagcgcatgttgagtccccaccaggagccaagcagagcactgcaaatattattttattgtgttattttattttattcttacaaacaaccttataaagtaggtcctcttggtactctttttttaaattgaggaaagaggccaagtgatgtgttcaagggaacttggaccaaactagtaggctgattgaactgggattcaaaccaggcagttgaacttcagaacactggctcttaaaaagcatgatttctaatattccactattttgtaatttttgtgacaatatgctacatgtactgttcatcaagaggtttctttcgtcctttttttttttttttttaagagttagggcctctttctgtcactcaggctggagtgtggtggtgtgatcttagttgactgcagccttgcgcttctgcactcaagtgatcctcccacctcagccccccgagtagctgggacatatatgtgccaccacaaccagataattttttttttttttttgagatggagttttcgctcttgttgcccaagctggagtgcagtggtgcgatctcgactcactgcaacctccatctcccagggtcaagtgattctcttgcctcagcctccttagtagctgggattacaggcacgcaccaccatgcccagctaatttttttgtatttttagtagggacagggcttcaccattttggccaggctggtctcgaactcctgacctcaggtgatccacccgcctcagcctcccgaagtgctgggattacaggtgtgagccactgcgcccggccccggataatttttacattttttaacggagacaggtcttgctatgttgcccagagttgtctccagctcctgatcttcaatgatcctcctccctcagcctcccaaagcactgggattacaggcataagccaccatgcccagccttttctatacatttaaaaatagtttttattcagaaatgttattaaatgggaaagaaaaacaaattttattaaatgggttttagacctcaatataacttttttatcccctgcctataatacaaaaacatgtcctaatttattaattttctcctacttatctttcaaatgagatttgcacagatgtacatggcaggaaacattgaaataaaaaccaaggctgtatttctgaagcttagaaatattttaatgatatttaaaagaaatattgtatttaaatgatacatttttattttagggtttgatatcataaatatgcagcaaacctgtacttctcatggtttattttattaaacacatttctcactcttccgcattatcttttctatattactggttttattttcctgacaattattaaggatatctttgtctatatcttaaaaatcattggactctttcctcaaatggtcaaggctaatttgtgtacaaacaataacttaaacctatctttgcgtgactgttttctgtccttactatagctcagtcacctaattcagtgtagtgccattggaatttcttattctcttttcagattttgattaaactcagttcagtaattaggtgctatgagaggctttcctctttttcaacctcttggtgctacattggctattccattctcattagcttcttggaatttctctttctgtctctgcctacccactctctctctctctctctctctctctctctctctctctctgtctgtattctcatctgtaaaacaaagataataatagcatacctctcacagaattgctgtgagagttaagagaggagagagagagagagagagagagagatagatgtgattggcacagagcaaacaccttgtattagctcttattgtgttatattaattattattaagattgctttttaattctgtatagtatgtaagatgtggcttatctttatagatgcctttattagctcttttctgcagtggcttaaaaatataacacctacaattcaccaatttacctaatgtaattaaaagcacaagaaccaggggtcatgaaaaacagcagtgcttatccattggtaatatttacaaataacaggccctttgcatcaaggtctatagaaaatatagactataaaaaacctgatattgagaatgagttgacttcttgagattaggactttctctccttcatctctgttttccctgcagtgcctttcacaaagaaaggtcctccatgatttcaacaaaatccagttggatcaaggaattatcaaggcctgagaattgtagataccatcagattctaattacccacaatgatagaaaaggggcataaaaatgacatgacacccacaagaactcagacctcatttaaacaaaacacacttgtataaaaactaataaattaactaatatgacttcacttggtttccgtttatcaacaccttctagtagaggggataaaaactgggaagatgaataagctataaattggctatcagcacaaaatgaactgatttcctagctctcaaatgtcatctttaaagcaatattttattttggcttattctagggatagcacttctctggctagcatttgctggaatttgataattgatgcttctggttttgtttgtacatgaacttagagaggaatacgttgtagaatcaaagcttgtggcagggccagtcctagataggctgggatgtggaagatgccactataggaatgttctatgtctttggtgtcttaatcagctggcataagaattaagttccttgaggtcagaaaacgtctatgcaactgtatcttctttccctagcacagtacctagaagtgaaattcttatgtgtagacctagtcctttcagaattagcaaagaaaattgttgtctcagtggatagagggagcctcccagaggatggagcaagaaagctctcttcttcccattattatcttacattaatcttacaaaaactagctgccactaaataccatctctccctgcaggagcatgtgtgtttgggcccttaggaagcgcagtgagagacagcgacttgtcacatgttctagtttaaatttctggtgagcaaatacttgctctccaatacccaacccctaaggaaaagagtttagacctcagagcatggttttgttgttcttgctttgctgctgctcttgtttttccttcagatttgtatgccgtgttaattggatcttctttgtagatttccaggacaactctacataaggcacatcttggttgcccaagttaggaaaacacaactaagctcatgaaccaagttccctatacattcctgctatatgcaaggaactcaacaggagctttgttgatgaggaaaaaatgagtggcttctagcatggacttggagtaaagattgcagcaggcacatggcaggcagtattgcactttatgttcagtggctagttcctctaaaagtccttcctttcccaccacgtatctgggaagatttttcttccgagctacaatcatttgacagaactgcaatctgtaaagagtttcatcgtgttctgctatttctctatttttcccttttgttttgctttttttcattcgagctatgactatgtttgatgactccagcatgagctcttgcagagccttgaaaactgtttttcaacttttccctttaggctgtgtcaaactaacttcctcctttttattaaaacaaaaactaacaaatctgaaaaaaaaaaaatctcctgcaagcttctagtaatgggtactccttagcatgattcaccataccaggatgttgaaatttaattacgttattcccaccattgttttgttatccaaaccactaactttctgaatgtccagctttgttttcttagataaaccattgcaagtaagaattgatcaacattaagaaacttcttttcaaatcatgcaaagttatacgacttaactgattgctctggttgaggaagtagaacagaattgttgtcttagacttattctttttttgtatatgacatttaccgttaatattttggcccagctatttttgtgttggggtcttatcatcctctaggcttatttccagacttttcaaaatcatgtcgcacttctcattcctggcatgtatttggtttctactttaggatttaagctttatataataaaatattttcaccattgtggctatttagtagttagaaataaacaactacctactttctttttttattattattatttaagttctagggtacatgtgccccacatgcaggtttgttacataggtatacatgtgccatgttggctggctgtacccatcaactcatcatttacattaggtatttctcctaatgctatccctcccccagccccccaccccctgacaggccccagtgtgtgatgttccccaccttgtgtccatgtgttctcattgttcagttcccacctatgagtgagaacatgtggtgtttggttttctgtccttgtgatagtttgctgagaatgatggtttccagcttcatccatatccctgccaaggacatgaactcatccttttttatggctgcatagtattccatggtgtatatgtgccacattttcttaatccagtccatcattgatggacatttgggtttgttccaactctttgctattgtgaatagtgccgcaataaacatacatgtgcatgtgtctttatagtagcatgatttataatcctttgggtatatacccagtaatgggatcactcagtcaaatgctatttctagttgtagatccttgaggaattgctacactgtcttccacaatgtttgaactaatttacactcccaccaacagtgtaaaagcattcctatttctccacatcctccccagaatctgttgtttcctgtctttttaatgatcgccattctaactggcatggatggtatctcattgtggttttgatttgcatttctctgatgagcagtgatgatgagcattttttcatgtgtctgttggctgcataaatgtcttcttttgagaagtgtctgttcatatcctttgcccactttttgatggggttgtttttttcttgtaaatttgtttgagttcattgtagattctggatattagccctttgtcagatgggtagattgcaaaaattttctcccattctgtaggttgcttgttcactctgatggcagtttcttttgctgtgcagaagctctttagtttaattagatctcatttgtctattttggcttttgttgccattgcttttggtgttttagtcaggaagtctttgcccatgcctatgtcctgaatggtattgcctaggttttcttctagggcttttatggttttatgtcttacatttaattctttaatccatcttgagttaatttttgtataaggtgtaaggaagggatccagtttcagcttttacatatggctagccagttttcccagcatcatttattaaatagggaattcattccccatttcttgtttttgtcaggtttgttaaagatcagatggttgtagatgtgtggtgttatttctgaggcctctgttctgttccattggtctatatatctgttttgttattagtaccctgctgttttggttactgtagccttgtagtatagtttgaagtcaggtagcgtgatgcctccagctttgttctttttgcttaggattgtcttggctatgtgggctctcttttggtttcatatgaattttagagtagttttttccaatattgtgaagaaagtcaatggtagcttgatggggatggcactgaatctataaattaccttgggcagtatggccattttcacgatattgattcttcctatccatgagcatggagtgttcttccatttgttcatgtcctcttttattttgttgagcagtggtttgtagttctccttgaagaggtccttcacatcccttgtaagttggattcctagatattgtattctctttgaagcaattgtgaatgggagttcactcatgatttggctctctgtttgtctgttattgatgtataggaatgcttgtgatttttgcacattgattttgtatcctgaaacttggctgaagttgcttatcagcttaaggagatttggggctaagacgatggagttttctgaatatacaatcatgtcatctgcaaacagggacaatttgacttcctcttttcctaattgaataccctttatttctttctcttgcctgattgccctggccagaacttccaacactatgttgaataggagtggtgagagagggcatccttgtcttgtgccagttttcaaagggaatgcttccaggtttgcccattctgtatgatattggctgtgggtttgtcataagtagctcttattattttgagatgtgttccatcaatacgtagtttattgagagtttttagcatgaagggctgttgaattttgtcgaaggccttttttgcatctattgggataatcatgtggtttttgtcgttggttctgtttatgtgatggattacgtttattgatttgcatgtgaacaactacctactttcagtcaaattatctcattcttgttgtcaagttgaatggacactagacaatgtaagaagtaaatttctaggctatacagattttcctgggtgaggttgaaaagaatattgacctcatcaggtgaccttgtcaagatgtttaatttctctcttctatacttattataatttaatacattatggatgtttgtttatttaagtttactccattcatgagttatttggaggatgaactaatgttggtagtgatctcacatattctcagataggagattccagataagtgccaagtggtaagaacaaaatagagttcaactgttaaatattaagaaagtgttactcagtggtttcagtttgttcagaaatagtgcaggccacctcagatcaccagaattacttagatgcttttgttatgctagcatgacctaaaaatctgcttgggaactaaatatttggcgctctcttttgtttttgctgaccagtgcatgacatcatgatttctgccagcgtgccctgctttctggtaattcagctcttacccccattgctcctctccttttcacatcctggctaacctctgatcagccttcagaacctgcattttgggtggggtgtccctgttttgggtgctccctttctacctcgtgcttccatcctaaccctactgggtggtttgcacctgcttatttattggttgttctcctaaacaagaccacaagcatctagaagtcgaaaccatgtgttactcactttggaatctcttgtagaggacccatgctccatgatccttacagcaaggatggtaaatctgcagtggtgtaggactgtctgtctgtctgcatatctcctagaatggtaagacggagtgtgcttgtggtgatcgcttaaaggaacagggagaggcagcatggcacactgttcaagaataaggactctggatccaggctgcctgagagtaaaccctcgctctgccactttctagctgtgtaactttgaagaagttacttaccctttctgtgcccagtgcccttcatccgtagaatgaggataatacatactaggaggctgttgtcaggattaaatgagatagtatacttcaactgtttagaatcatgctagttcatagtaaacacttactaaatgctagctactatttttagggatactgaccctaatgcacagtatattaatgtatagtatattaccttatgtaatctattaaggttagccacagagaaatgtatgttgaaatgttggagacctagtagaagagacaattgttttaagacacttggctctcaagtagaaggcacgtttgaaggggacctagcatgaaactataaggcttggctgggtgcagtggctcatgcctgtaatcccagcactttgggaggccaacgtgggtggatcatttgaggtcaggagttcaaggccagactggccaacaaggtgaaaccctgactctatgaaaaatacaaaaatgagctgggtgtggtggcaggtgcttgtagtcccagctactcaagaggctgaggcaggagaatcacttgaacctggggggtggaggttgcagtgagctgagatcgcaccactgcactccagcctgggcaacagagggagtgagactctgcctcaaaaaataaataaatagatataaaataaaataaataaggcttgtgtaatttaaaaattgttggtcacctctgtcatagcattgagttagagataagtaataatttaaagttgtcaactggatactcttggttcaattctaaaatgtgctcaggtaggttacttgaagactgaataaaatgtcagatacgccttttttttgagacggagtcttgctctgtcgcccaggctggagtgcagtggtgagatctcggctcactgcaagcaccgcctcctgggttcacgccattctcctgcctcagtctcccaagtagctgggactacaggcgcccgccaccgcgcccggctaattttttatatttttagtagagacggggtttcaccgtgttagccaggatggtctcgatctcctaatgtcagattcacttttgattgacccaagcttcttttgctgcaagtccatctgtatatttttacctcaacacaaagccacgtacacccacatccacacacggattcttgacccatgcttaccaatactggccatgccctaaggcagctcaggacagtatttgttattttaggaatttcccatcttgaagcacagccttctctgtgatgtcagtttattcagacttcaaagtctgcatgtaaacctgttattgtgcctactgtaactattatgactcggtgcctcatttctcacttacggccaagcaaaccccccaattatccacacacgaatggagatcaatggcatggatggtgctaagcaactgatttggttttgaattgaactatgtgacttttggaacatgagatgttccttttacattacagtttactttggctaacaaagattagccaacattagatttagtcctactgtggatggtttttaaatttctgtgaataattttcaagaattagtacttctgtgtagacactcactgatcactttacacactattagagaggcaggtggtggagaggagaagggtgaggttttggagtttgactcagctcagatcctggcccgggccagagtcctggcccttactctactgttatattaggtagattgcagttgtcttgactggataacagaggcaatatttcctgttctgaatgttaagaggattagagaagataacatattggggagatattggcccaaagatatgaaatttcagttagataggaggaataaaatatatacataatttaaaaatgtatatatatatacacacacacacacacacatatacgtgtgtatatatatatatatatatatatatagaccagttttataactatttataaattcatttcagcattcctgattgcctaaatatgtttcctgaatttacctttggacaatttgtaacatattatgttggtgcaaaagtaattgcgtttttgtcattgcttttaatagcaaaaactgcaattacttttgcacagacctaatatatctgcttccctaattagttaatgagctaaataaaatccttgaaacatgttcattttagaaaatacaaagaaaacgtctagaaagcatccaccacagtgacacatggtaggtaatcaatcaatgttacctgttattaatatatacaatttatagaattctgaactaccctaatgaaaatcacagtgcatggaaggataatgggcatatgtctgttataatctagccacagaaaagcagtttttttgtttaggtaccccctcccaaatgtctttattttaggtttcctaaatgtaagaattctctatgaagtttccatatataagtagacacttataacttaaatttttccatcctactttagccaccatttgggaggcacctgtcactattttgcaagtcttgttggatgccttgggtaggaagtcctttggcatctgccaggcagtgggagagaacccagcagagggggaggctgagcgtctcataagagagactggaccatggcagcctcagagagatacgcaggatcagcgggcaccccacataactggggccccaaaagaatgaggcgtattttggggaaatgctgataattgctgtagaatacttatataaaaataaaatcaattcatgcagttatatagatcttagattatagattatatttaatataagacaatgcactgaagaaaaagttttatgttagaccaatagaattcaattttgaaatgttaactttgataatatatgagtgtactttctggattttaaactttgtaaaaaaacctatgtagttattttaaggtaattggaaaatgcattttggctgttactactcttgattaaaatgaggagcaggacaatatgtttgaaaaagacacaatattgaaggatgacaaaagacctggctcctagctctgtgaccttcagcaaggtcgcttcacttctctggggatcttaaaaggatgaggtgctttcgtttgttaaaaccgatcttgctttgttttgggagtggctgctctttcctttttcagctccaacatgccctgattttaattggtatcctcacctctttttgtgccggaagaaaaggcagcccgagggcattcagaaaaaaatcctgtgccctgaagctcttgagccactgagaacttaatgagccagggagagagacaactccgatctttctgaaatgacaactaaaaatatgttgcattgattgggttttttatagttataaaatcttttacttaaagtgtacataaaaggatgatggcatgacaattaagagcttcggtttgcaatcacagttatgggttttaaatcctgggtctaccatttacttggctgagacatgaaggaacaagtaatttaatctcccagagccttagtttcctcatttgtaaaatgaggatagtaatacctatctcccaggcttgtgatgaagattgaatatggtaatatttgtgaaaaaatcttagcacacaccgaaaagtcctagtacaatgagctgacagtaatagtagctattgttagctactatggacattgacttgaaccacatctgagcgtgtttgggagaaccacggtaatgtttactttgcaaaaacatgctctttttattgtttgatcacactttactgtaattatcagtttaatgtctgactatccccactagactatacaatctggatctgtgagccagggccatgtccctcttatctgccctgaacacctgattagcacaatacctggcatgtcatttctgtgtaggtaaccagaggaggttacaccagctccccatggatggcaaacctaactcagaatagggatttgggtgccaggaagacaaaagcaggaggtgaaagtaagttgttcagcattccatttccttaggattactctaaatggctaaactacaagttgaagtatgaaatgcatcagaatcaaggtctccaggttggtgtagccctggccagctcaacatgaaatgagagccatgggcaacagcctacagcaccacatacagctgggtggagagtgacttcaccttagatctttatggtttcttctttgagaaaataataagtggttatctgtgttttaatttctgttagaagtaaatttgttccacattccttgtttctaaagccactcagtgactttattaatgtgtattgaagttatacgcgcagcttttgattagtccatcaccaagatcctctaaaaacaatgttttcctccataaatgaagttctgtcctcaacctgaaagtcatggatatggattggtccagtgtcatgtagatttgcaacctttcagaataatgaagaaactttggtattagtcataaagagggcacactctgagcaggaaggctggccgagggccaggaggatattgttcacaaaagacctgcaacagagaatctgaaatttggataatcttaccaaggtgttgaaatcagcttcttagtgttaccgaaaaggaagaaagatttccagacagagactaaataagtctcctaatcaatgtgaaagaatatgtgccttgggaacaaactggagtggatattatgttcatctctttctcaaccctgtctttcaataacacacgtcagttttttttgatatttttaaatttatttttatttttatttgtgtgtgtgtgtgtgtgtgtgtgtacctctaagttctagggtacatgtgcacaacatgcaggtttgatacacaggtttacatgtgccatgttggtttgctgtacccatcaactcgtcatttacattaggtatttctcctaatgctatccctccctcctccccccacaacaggcccccgtgtgtgatgttccccaccctgtgtccaagtgatctcattgtttaattcccacttgtgagtgagaacatgtggtgtttggttttctgtccttgtgatagtttgctgagaataatgttttccagcttcatccatatccctgcaaaggacataaattcatacttttttatggctgtatagtattccatggtgtatatgtgccacattttcttaatccagtccatcattgatggacatttgggttggttccaagtctttgctattgtgaatagtgccgcaataaacatatgaacacatgtcaatttttgccagatacacacggagaggtgtgaattaaagtcactgttgagtaagtctgtgatatgtgtctttcaatagaaagaaggaaaagtctctgaaagaacaaacaagagccctcacatccaaattgttaaaaaaaaaatggggtagatgtatggtttctgaaatcatctccaaatggatactgtctattaaatgtttgtctccaacataattcacactgaaatgcaaatggaaatgattttttccttggaatagagtgaatatgtagtgacttagatatttttcaaaaagggccacgtgtggtggttcacacctgtaatctcagccctttaggaggctgaggtgggtggatcacctgaggtcaggagtgcgagaccagcttggccaacatggggaaaccctgtctctactgaaaatacaaaaattagctgggcatggtggcacacacctgtaatcccagctactcgggaggctgaggcaggagaatcgcttgaactcgggaggtggaggttgcagtgagctaagattgcaccactgcactccagcctgggtgacacagtgagattccatctcaaaaaagaaaaagatacataaaaaaggatatatttaaaaagatattaaatattaatataagccaaactcatgattcctaaatttctccagaaagtttcaatatggcttaacatagacccaattcctcatccgcctgggtaatttatcctgtgatttgtagcaatactgtgtctgtgtttgtaatgctcctttcagtgaactcattgtgccaagctatgcttatgatttctatcatcttcatcccccaactggccactattaataattagatatttatttatttgtaatcaaccatggtatctggcactggcattctattttagtgaagctcaatattttcagaaaaatctcagaccatgttttcagggcatatttacactaagagtaatattaaggtatagtttcaggagagaagatagcctaacctgtactgggaaaaaaacagagaaaaatagaaagcgttatacaattatagtcatcctataataatgtacttcatgcagaatttttcagttatgctcattcctttagttgtctgcagtaaaaagggtgccaacagacagatctgatgccatcttctaggatttccaggtgtttcaggggccaaatgacatgcacctccagtttggcaggcatgctgcttgttgtctgtgcataatctcattaaaacaacataaaagcagggctgattgcagaaatccggggcatctttttcaggtgtgtaacacaatatttaatgaaagtatcttttctgaaactcccggtcagcactcctgatttagccagctcttttttcacctgtggacttcgctgctcagttcgtgtgtgtgtgtagactgagggtgtttttcctcgcttatacaaaccctctgtctctgccattgccccttaagggaacccgctgaagtttctcagatgccaaagcacagttagtgctccagggcaggaggggcttccccctagttattctgttgcagctgttccttgccccatcagtcaccctgatgtcccaggaaaggcaacacaagagtgagtaaagaaagggtcacagagcagcatttcttgtgcacgtaactccatcccaaatgaaaatgcacaagtgggccccgtgtccctgatcaatgtgatatgtgtcttaaaatactgaggttcactaaaataggatgccagtgccaggtaccatgcatgcttgattaaaagcacgccctgcttcctgctcccctggctagtgatgggcccaccctattacaccaccctgcctgcgactcagaccacaccagaaagcctgcccatgtgcagagccagagttcagagatagtgacacttcaagtaggcaggggtgcagcaaggctcaggacgaacccaggcagcactgggtggccttgatctgataccgaagcctggcctcagctcttgaacttggctcccctgcaccctgaggaaggaactaaccctgggccctgtcttgccttctcctggacctcttactttcttgcctcatctcccctatggattctgtgcaatcaaaacagaccctccgaccctggctttattttacactgaaaagcaccaagatttcttttgccttgcaatggaagtttatgggccccaaataagagttactctttataaaaacaaacaaacaaaaacctaaaatcaacctattcttctggagaaagctaaacaaacatgagaacacacatagtccctgaaattttggtgtacttttctcattccttgttctctgggtgaatatatctcccctgaaaggatttcctctagtccgctactgcaagtgatcttgttttttgtcctcagtagcactgttcatacctttgtttcgtggccttcccaggggaagtactgtcttgtttatctttgcatctgctcctgctgcggtcatcggcagagcactgtcacctgccatatgggagatccttaatagtaatttatcactaaatgatagctattgattcatttccccactagactgcagcgattagtgacgatttgcacatagcacgtgcttaataaacatttactaaattgaactaacatgaaagcaaaagcaaccttttgttttctaactaactacagtctgcctaaatgatttgcgctgcagaacagaacaaatagatggaaagcttggcaaggttaaggcagcgtgcagaggaaaggtgctggctgagtcaggagaccctggctgtgactacttttgctttgactttgcccccgtggatgccctcatctcctttcaggatgttgggatggtctaatggctataaaaacactttgggaagagtttacagcattttacagacacaaggtgttattatttcctttacaattttcaatagcaaaaaaacataataagcatttagtaaatgttgactatcagtgttaaatactgtttactctccaaataagtgagctgtaatacttgtgtaatgctttctcacaggtatgaattaggagccgctctgtttattggatgggcaggagcctcactgtgcataattggtggtgtcatattttgcttttcaatatctgacaacaacaaaacacccaggtatgaaaaagagacaaaaatgacctgttaaaaagtagaatgctatcataaatcattacatgtggaacaaattacagatagttcatatgattcttagaaacttccaaaatccggaattggaaaaggttagcagtacagttaattttttaaagttttaccattactatattccaaagaaaattctaacgtagaaataagggtctgaatatgaggacatgttcttcacgttggcctcatcataattttcctctaggtaggcaggaatgttgatggcctctactaagtctcctagcttccaggagggtgagttttaaaacatggttttgtaagaggataactgaacaaatgaccaagtcatgagtttcttctgcagagattctccatcccactcagaaatgacactgaaaatacttcttggggcaagaggagagaagaaagctatctaagaaagaggaagatttacatttagatattggcagagacaggccgaaacagtttcttcccatttttgtttgccctatgtgtagaatagaatctaccaaactatgttttacctttcagatacacatacaacggggccacatctgtcatgtcttctcggacaaagtatcatggtggagaagattttaaaacaacaaacccttcaaaacagtttgataaaaatgcttatgtctaaaagagctcgctggcaagctgcctcttgagtttgttataaaagcgaactgttcacaaaatgatcccatcaaggccctcccataattaacactcaaaactatttttaaaatatgcatttgaagcatctgttgattgtatggatgtaagtgttcttacatagttagttatatactaatcattttctgttgtggctttctataaaaaataaacagtttatttacaggatttgtaaaatgttttctacatttatatagaacatgaaaagcatttagtaccaaaggttcaagaagtattcgtactctagcctttttaatcattcatagatagaagtctttgtacccactccttatgtttcttttcattcataaacaggtgtataaggaacaatgtcttataaacagcatgggggcaatctgagaatattcctcaaaaggtgtccaggttaaatagacatgttactggctgcacacaggcaaattctagtttgttttttttaagtattctacaacatttatttaaaaaggtaaatctttttgttgaagcagcaagttatctggtagaacttaacttctacaggatcagagaggatcttgctcattcatggccatatccacatgcccatggccactcagtagattgttgaaaaagcaaagccacaccattctctttgatgtatgcagagagttacgtagcaggggatgttctctgatttattccactggcaccattagtgaatatttagttgttttcataaacgatgctgtgatgaagactcatgtacatatttagcaaattttggtttcttacatgtgcctgtcatgactgtaattcattatgactgctccaggaagggctaatggggccaatatattattgcctgtcatgtggcacatccatgttaaggggctgaggcgtccctggcacggaatgcagagccctgagctagggcatcagcagaagctgagatagagatattggtcatggttgactgaggagccaattaaaacctgtttatgcctagtgttccattattggaacactaagcatgtgggagttatttatatcctactgctcaaggtcatcgccaaggtgtgattggaaaaattcaaaaaattgcaacctcaggcataaatgggttaaggacatcccaagcccaagtggtacgtgcctcactcagaactgacgggccgagttctatctaggtgtgtcttccagaacctgtttacggctaactggataactgagagacttgtcatttctaaagacatttaagttgctccagggatttctgaaaaaagacacaggcttcttcctagagccagccctatataacatgcccacaagggcaacagttatcacagttcatacacacctttcatgtcctgtctcactcactcctcacagccatcctaggagatacatattgttttcatcctgcatttacagaaaaagaaatgaaaacagagagcttaaataatttgccacagtaatgtcgaaactaggcctttgaaccaaggcagtctagggtaaaatatagtttcaaagtatgaataagaattggtatttgtgttatctttgagtaagaaactgtccgatatgaatcacaacgtgggtgaatgtagtattttcctgaagtgtgaaagacttaaaaaaaagaatcacattgttcagaggtgctcaatggaaagaaaaggaaatgaacaagtttgttaaaagataaaaaataaaaaaaattccataccttgataatccttgaaatatcttttgcagaaatacaaatcaactgaaagacatgaaggtagattaggtcctacaggccagtgtgggacagggttgtgtaggtgtgcatttcaaacacatttattattcagaagtggtgcagataacgcttagattacaccgaagaatttagggagggtgggggatgaaggtctgttagtaaccagaaacacattagttgggcatcagtaaggggcaacataaaggaatggttcccctcaaaaacgaacaaaccaaattttatacaaaaaaatgaaatgcagcagggcgcgatggctcacgcctataatcccagcactttgggaggacaagacagcggatcatttgaggtcaggagttcgagaccagtctggccaacatggtgaaacctcatctctactaaaaatacaaaaaattaagccaggcatggtggtgggcacctgtaatcccagctacttgggaggctgaggcaggaaaatcgcttgaatctgggaggcggaggttgtagtgagccgagatggtgccactgcgctcaagcctgggcaacatagtgagactctgtctcaaaaaaaaaaaaaaaaaaagatacaactaaccatgtaagctaaaggaggggctcttaaaagacacagatatagtgacttaatttaaatactgggtttacttagcaaaagttcatttccccaagctcttctgctcaggaatgaaaacatggcagacacaaaacatggaatagagacctggcttaaagtctccccttgacactttgtacttgtatggcttctggcaacttacttaataactctgtttctcacacctttaggatgaggattataacaataactacatcgcaaagttgttgtaattaaatgaattagtgcgtgttcaaaaccaaaccagaccaagtggttcaataaatatctgctgaataaataaatgaatgaacaaagtggcacatgggccatcttaggcttggtgtagttttgtagattgccgttctctgtcctaccacatgaaacttggattcggccttctgttctctgtcctactacatgaaacttggattcagccttcactaaagcttttagaaacatacatataaagtgagtatatctgcatgaaatggcccctataggaagttggaaggattcttttagagggcaggaatgggctacaagtaaaaaggatcccagggtgggtggaaacagataaagatttgttctaaccattaggacagaatgtcatatggcatagcaatcaaggccagattctccctctgtaagacccctaataagtacaaatttaactcagaattcatctctaataacacagccacagtcacagtgatgtaacagagggctttactgaaaaggttgacaaatgaaaagagatctaaaacccaacaaatcttttagttaaaaggttacttggaaacagaatatagtataaccaagttataaaaatgcaaaaaacagcttataagaa

SEQ ID NO: 110 - DNA, 293469 bp, Homo sapiens
  source 1..293469: mol_type = genomic DNA
tgtaagcccagcactttgggaggctgacgcggatggatcacttgaggccacgagttcgagaccagcctagccaacatggtgaaaccctatctctactaaaaatacaaaacaattagttggaagtggtggcacttgcctgtagtcccagctactcaggaggctgaggggtgagaatcactcaagcctaggaggtggaggttacagtgtgtgagctgagatcgtgccactgcactacagcctgggcgacagagcaagactgtctcaaaaaaaaaaaaaaagtaatattctaaactaaaaaccaagataatggaaaaatcccattatgaacaaaatatcaaaattttaattaaagacaggattggtgttactgaaattgcctttgcctcaggcttcagtatggctggaccgggcactggctgggactaaggtggtgacaagaaagtgaccaaattggagtagacaggcgaggcctgaggtggagcaggcgtgggagctgggggagggcaccaaggggttgagcagtctcccctgttggtatcgaatataacaataattcttaggctcagcagaagtttagcatccatgttcccagtcacctggacttttccaaatcttggaaccccctctggctgaaaaggcttttgtttgtttaaacggccactttttgcatccaagagcacaagtcagcttccactggaaggttctgagaaacggtttcaggtttaagtctagagcatgaatggaacggagtcacagctgaaaaagaaacatgccgagtgccaaggaaaagacatggttaaggggtaacatgggcccgggtaggtgaaggtcggcaggtggaggccggctggatcagggaaggtgaaagaagaggcaggggcagggcccagcctgttttaacgcctcggcgttctcaccgctgcagaacggctgcagggggcagagtaaagagctgctgtcagtttccctgcccagagagtgccaacagctgctctgacctattgcaggcatgtgtgttccaggatgcagccttcctgcactttgaccactctagattaattgctaaccaagatatgcacatgatggggctcacaaagtattaggcggtattttaacaacaaaagctgcgaagaaatccctagaaatgttggctcttctggctgggaaaacgcagtctgtcaacagttgcctcaaaaactcagaagctcagagagttggattcggtcaccagagaggcccctcaaagaggccccaaccattcagatcctctgctctgtcccccatgacagcggggacgaaggtcctaagccctggccgggagggcagttgacctcgggactcgccgcggggcggagcgggtgctgggaggaaggagggcgtggctggcggggtgtggctggcgggacggggcggggcgaagacagagcgaggcggggcctgggacggggggggggtcggtgtcgccgtgggggcgtggaatgtggggtgggcgtggctaaaggcaaagggcggggcgcgcgcgtcgggaagatggcgctacgtctgctgcggagggcggcgcgcggagctgcggcggcggcgctgctgaggctgtgagtgcaggtccccgttccccgccttcccggcccggctcgccgcgggtcggctcctgttgcagccccgcgggccgggcgcggcctccccaagccctcacgggaacccagccggacggaagcaccatgcgcctcccacgcgctggctcgacctcgtccaaggtcgctgccgcccgcgcctccctttgggagggccctcgttgcacccggaaaatgggtacacaccttaggtcgaattacctggactcagccccaggaaacaaaactgcctgcctcccccaaatggcaaacgtgaacgcgccagtctttgagaggcggcttgcctggtgaagaacacctgcggttcgtttaacacagcggttcccaaacggtttggtctcaggacccgtttacacgtctaaaaataatttgaggaccccccaaagcttttgcttatatctattgatttttgtgcatgaggaattaaaccagaaatttaaaaaatattcacttaataacaaacccattaacttttaatacaaataacactttaatgcataacttctcaaaaaaaaagtgagaagattggctcatggtttttatatttttgaaaatttctttggtttaataaaggacagctggagtctcatatcagctgttttgaaggaaatatttgaaagaaattctgggctcatgcagatgcagatattagttgggaaagggaggaccaagcagaccctctcaacgggtctcagggaccccctcaggtgtctttggaccacactttgagaaccgctggtctagcacttgcccatcgcctaggtacgtgcacatacatggtctcatttggttcccttgaccaccatgtgaagaagttgggtgtcatgtttataaagatgaaaaaacagggtcagaaaggttaaggattctcaaagccctatgaccagtaatgagagagtttggttcaaacactaagtgtatggctcctggtctggaacttctttatttatttatttttattttttgagacagagtctcggtctgtcacctaggctgtagtacagtggtgtaatctcggcttactgcaacctccacctcctgggttcaagcgattctcatgcctcagcctcctgagtggctggcattacaggtgtgcaccaccacccctggctaatttttgtatttttagtagagacagagtttcgccatgttggccaggctgttctcgaactcctgacctcaagggggtccacccggatcagcctcccaaagtgctgggattacaggcgtgagccaccatggccggcctggtggtctggaacttctttttttttttttttttttttttttccgagatggagtttcgcttttgtcgcccaggctggagtgcaatggcgccatctcagctgactgcaacctccgcctcccggattcaagtgattctcctgccgcagcctccggagtagttgggattacagggcgtccgccaccatgcccggctaatttttgtatttttaatagagacgaggtttcaccatgttggccaggctggtctggagctcctgacctcgggtgatccacctgcctcggcctcccaaagtgttgggattaaaggcgtgagccaccgtgcccggcctgggtctgaacttcttacgtcttcttgcactgtgactcttcagtcacccatgtcctatgggaggacccacctagtcttatgcatcccactttcccatttcctccgctgcccctggcacaggggagtcacccctcgccctagaggagcagctcaggcagtgtatccaggctggtccagaagggtccttttctggcgccttttgagggggccagcgtctgtgacctgttcagtagcgggtccagtgagcgcacacagtccccacgccagtacgctgggggttaactcagtgctcctcacccgccttagcacactggtctgttctcgacatgtctacccgctgaatataggattcttgattggcattttttttcctttgagcattttaaagcgtattatcgcactgtctttttgcctccattattctaatgagaattcagacgttaatgttattagggttctatgtaagtgatgagtctttttttttttttttttttttttttttttgcttgattttctctttgtcttggtctttcggtggttttattatgatgtgtgtagatctgtttgagtttatcctcttggaagtttattgagtttcttggatgtgtatacatcaaatttgggaagtttttggctattgttctctcaaaaaagtctactctcttatctctctcttctctttcggaggctcccattgcgtatatgttggtgtagttgatggaaccccacaggtctttgagactgttccattttctttctgttcctcaggctggacaatgtcaattgacctgtctttgttttttttttttttttttttttttttgagacagagtcttgctctgtcaccaggctggagttcagtggcgcaatttctgcccactgcaacctctgactcccgggttcaagcgattctcctgctccagcttcccgagtagttgggattacaggcacgcgccaccacgtccagctaatttttgtatttttagtagagacggggtttcaccatgttggccaggatggtctcgatcttctgacctcgtgatccacctgccttggcctcccaaagtgctgggattacaggtgtgagccaccgtgcccagccgacctgtttttaggtttgctgattgctccgtcttccaactcaaatcattttcattttaatccagaacttctttctttttggagaatgagtctcactctgtcacccaggctggagtgcagtggtgcaatctgggctcactacaacctctgcctcctgggctcaagctgtcctcccacctcagcctcccaaatagctgggactacaggtgtgcaccactgcacctggctaattgtttctattcttttgtagaaatcaggtttcgccatgttgctcaggctggtctcgaacttggctcaagcaatctgcctgcctctgtcgctcatagtattgggattacaggcatgagccatcatgcccggcccttttctatactttctatctcttcattgatattctctatgtactgaaacatcgttctcatactttcctttagttctttttttctttctttctcttagagacggagtctccaggctggagtgcagtggtgagatcgtagctcactgcagcctgcagctcctgggctcaagtgatcctcctgcctcagcctccccagtagctgggactacaggcacacaccactatgcccagctaatttttaaattttttgaagagacagagtcttgcagtgttgccaagggtggtcttgaactgctgggttcaaatgattttcttgccttggcctccaaagcagtggaattctaggcatgaacgactgcacctggactccttcagttctttatgcatagtttcctttcgttttttgaacatactttaaatagatgatttaattagtaagtccaacatctggacttcctcagggacagtttgtactgactacttttttcctgtgtgtataggtcatactttcttttcgttgcatgtcttgtatatttttttgaaaactggacattttaagtaatataatggggcaactctggaaatcagatttctcccttttgccagggtttattgttgttgttgtttgcttagtgactttaataaactaattctgcattgtattctttgtcatgtgcaaccagcgaggtctctgcttggttagcttagtagtctaacaattagacaaaggtttccttaaattcctggaaccagtaagtctcctagtctttgctgagggactctgtgtgtgtcaggacatgtcttcaacattcagccacagtttgtcctgcttccacagagactgaaggttagctagacatgagcacttaaggtctttccttagccggtatacagccctgcacatgtgcgtggcctcctagagtctcaggaacatgtcacaacttttcagagctctctatgggtatcttgttctccatttttgccttttaagtgttttggttagcctgttgtttaccctgttatcttccatctcaagtagctgtgatggtaaataagtacttctgattgtttggacaaatgccctccgggaaaatactgttcccactgtgcaagctctgagtcaggtcaattaaagacagttttacaagtagggtcttccaaggaaccacaagacaggtcaaatagtgacattttccagaaatggggctttccccctctagtggctgccatgctgctggttttcactgtgatgggggctattgattttcaagtctaccacagagctggggaagagggatagggtaaactaaacccccacgacaattgctgttcttactgagattcatacatttttcttgaataaatgatccctatattgctgcaagtctttaatttctagaattctgaaaaagtttattctgacaatttttgccaatattcttgttgattttatggaggataggattttcaaaggtcctttttctgtagtttttgctgaagtcagcctgcatagagttttgatcgagtggatttgaatttataaatttttttttgcatctgttgtgttgatcataaggcttttcttcttcagtgtgttaatacggtaaattacagtgattgactttttaaaagttaagctgaccattgcattcctggaataaaccccactgattgtgatgtattgtttggattgcatgtgctaaaattttgttaaaattatttgtatctgtgttcataaggaataatcgcctatagttttctgatattgccttggtctgggtttggtattaggatggtgatggtcacataggatgtgttggagagttcccgcttctatttcatgaaacaatttgtgtaaatttggtaagattttgcctgtaaatgtttgcacctgcagttttctttgtggaaaaagtgttaaactacaaatttagtttctttaatagacatattgccattcagattatctagttcttcttgagtaagctttggtagtttgtatctttgaaggactatgtccatttcatctaagttgtcacattcacgtgcctggagttgttcatgctgactccttatcctttttcttacagctctacaaaggtatataccacacaattcaccctttgtaagtgtgtgattaaataatttctagtaagtttataggcccatcactacagtccaatgttaggcccccctccaaatttctatcatcccgcaaattctcttgagcccatttgcagttaatccttacccctgcctctagtctgtcatctccttactgtttgtgtcatccatagtgatgtgtccttcttcatccttgatatttgtaattcttttttctctgttttttattttatcacctggcttgagttattttgctctttttaaagaaccatctttttgttttatcgatttttctcttttttttgttttctatttcattgatttctgtctcatctttattatttcctaccttcaccttactttgggtttaatttaccctttacctttttaaggtggaaatttagataattaattttagacctttctactttttttttttttttttttgagacaaggtcttgctctgtcacccaggctggagtgcactgatgcaatcttggctcactgcaacctccacattctaagctcaaacagtcctcctgcctcagcctcccaagtagctgagactacaggcattagccaccatgtctggctaatttttgtattttttggagagacggggtttcgccatgttgcccaggcttgtctcaaactcctggattcaagcagtctacccaccttggcctccgaaagtgctgggattatggatgtgagccgccacacccatccggggtctactttctaaatataagcactcagtaattactttacagccatgcttggtggctcatgtctataatcccagcactttgaaaggctgaggtgggaggatcacttgtggccaggagttcaagtccagattgggtaacatagtgagatgctgtcactacaaaaaaaattttaaaagttagctggatgtggtggctcatgcctgtgatcctagccacttgggatgctgaggtgggaggattccttgagcctggggatttggggtttcagtgagctgtgatgataccactgcactccagcctgggtgacagagcaaagctctattaaaaatagtgatgataataataataataataataataataataataataataacaaaattccctctaaggattgttttaattccctctagcaaattttgcaagatttctgatacctgtaatctcttttcatttcttatgttgatactctgtttctgttttctaaagtattcatagtaagactccaaaagaaaaagggctccctggctgtatgtgttcagtggtagcagccaaggaatgtgccaggaaggtacttcacattttgcagtgccgtggtggagaggaatctggtaaagaaaaaaccagatgaagacagtttagagaggcgacaactacaagctaagtacctgagattctgggtcaacaggaaggggacagtgtgtgaggaagcagcagggccatggaaggtggctgaggggcctggatggggttacctgtcagggtcccaataggccttttgtagggttggcttcatctttgaagcctcctgaggttaccgtgacaaccactactgtccctctgtactgctgtgaggccactaagggaaaaagggagggaagggacccaaagggaggacagaggtgggagaagagggagcgatggggagagaaaggcagagaacaatggaagcagtgagcgagaaaggggagaaacctcactgaaaaggaggcagggtaaacatgactgagatggaaaaatgatcacattaaaaagaactcactcagagtaaggatgaatgtgtgttctttgctacttgaactggtattaaaaggccaatgtgaagtgttagatattttaaaatgtttattggtatcattagaagttgacttcagttgcccaaatgcatggtgagaaaggggatgtgtaaacaaaaatgatattttggattgtgaggcagaaagtcattttaaatggccctgggaggcagagggcccaatcctctcagtcgcctgggactgtcctgggtttagcatggaatgccttatgttcccagaaaccccttaggtcccagcaaaccaggatggccattcaccatagaggtggagaagtaaagggctgtggatgaagacgggtacttattaggaacagggaggaggatggagttggaggggatgagtgcagggcaggatacagagcccagaaggaaaggaattgacagaagctgggagaaagaataaaaagaccagtggtccaagatggtagaccacaggttcaagaactggagcaagagtcttctggaatggcctccattctagaaccgagagagagtattcagaatgctttaatggagtaagaagggccactgcttagagtggggctgaagagaaaagaaagaaggagaccctgcggaagcggcaataccaggaaggcagttgtatgcacatcatgcagaccaggagtagcctaggggtaggggacatgcctgggctggacagtggaatttgtgggaaatcagatttccctgagcaaaaaccagtgggcagcagccaaactggtgagcaagaactggctgtggtggctgggcccgaattgggagctacacctgcccgggcaggtgtagctgcgagggaggtctctgccaacaactcagctgtgccgtgcctgctgaacggcctcaccttggcctctggctctgttgcagctgtgtggggctcgtgctcctacataccgttatcctgtggtagagttttaccgtggaccagagccatctagaggacattgagttacccacatactttctgtgggagaggccaaggagtcagggggggaggccgggacctgaagatcaactctttactgcagagatccctccctccctctctctgtcccatggatccagagggaagttgaggacagtttcatgccacatgcttgacccgactcaactgagtaactgtggccactgagaagactctgtccttgcaaataactctccttagtgcccatattctgcagaatgtttgagtggcacgagtacttcattcgtctagaaatatttcatggtagtcagttgctaataacaggatatctgcaggtagtgtgttctcaggaggcacacctgaagcctcaaaggtgaggacatagacatggctgtgggtgagcctgtgccaagacatgacccatatccatggggagtgctctcagggcagctgacactgctcagcctcagcagtctccagtgatagcttcggaacagccacggtctgactgatatactttctgaaaacagcctttggtcacacagtttcctaactaaatgtggtggtggccactagaagttgccattttatgcgggactccctgtgaggaagcccatagtgctggtagctgaaatttaggaatgcaggtttctaagaaggctcggaaaagcaagctgggctccttggggaggagctattagtacgtttaattaaattttttaacatataaaaagttgttaattataaaaacaacatttttttctaccctgagtgcagctggagctgtgttctgccgttacacaattcctcattaattccacacattgcttacgatcctgtgaagtttagaattttattaggcaataaataagaaatcaaggaaataatatttgtggtttcatatcggtcacttgggtatgaatttaaatccactgtaattcaaacaggtttagtttatttcatgttgctacttgaatgtgttatagcgtatcaattaaataactcacttgaatgatgcagacttgagattcattccctccttctttccttccttcctttctcaccccatcctccctaccataaaccaggtttagaatagctgttaatttagctgctttgattttttgttgttgtttattttgaaacggagtctcactctgtcgctcaggctggagtgcagtggcacaatctcagctcactgcaacctctgcctcctgggttcaagcgatcctcctgcctcagcctcctgagtagctggaattacaggtgcacaccaccacgcacagctaatttttttatttttattttttatttttagtagagatggggtttcaccatgttggtcaggctggtcttgaactcctggcctcgtgatctgcctgccttggtctcctgaagtgctgggattataggtgtgagccaccacgcctggcttttttttttttttttttttttttaagactggtgaagctatgttgcccagactggactgcagtggctattcgcaggtgttatcatagcttactgcagccttgacatcctgggcaccagtagcgcttcttcctcagtctctagtagctgggactgcaggcatgtgctaccacacccagctgattttatgttttgtttacatttaacgatgttaatctaggagcagtgatgatgttcactgttgttccacatgactctagcacatatatatttgtatgtgtataaccacagttgttcatttagtctgtttccaggttttcatttagtctgttccaggttcatttagtctgtttccagacctaaaaaggcctgttggctaccgcgacagccttggctgtcacactgggcccgcccatgggtgtttctgtaagtggccatgaacctcttctgaactacaccacatgttaacatccttctcttagttaggtctttgagattggcagaggtgctctatttaataataaaggaatgggctgggcattggtggctcacacctgtaattccagcactttgagaggctgaagtggaccgatcacttgaggtcagaagttcaagaccagcctggccagcatggtgaaaccccgtctctactaaaaatacaaaaattagcctggtgtggttgcgcatgcctgtagtcccagctactcaggagactgaggcaggagaattgcttgaacccaggaggtggaggttgcagtgagccaagatcatgccactgcactccagcctgggtgacagagcgcgactccgtctcaataataataataatagtaataataataatataataaaggaatgaaagtttccttagaaagtaaggtttctattttaatagaatacttgagtgagcaagtctgtcttaactgtttctcctcactgtgtctaaatgagaaggaagaatgaccctggtgtctgtatttgcaggacacttttcagtattaatattcagaaccccaaatattgaaaagtgtaaaaggcagtacttgctacttcattgtcccgttgctagccccagtaaaatgagggtcttagtttagcggaagactgtgtttactgtttaactcacagttcacgctaaaaattggcacttttttttttcctaataagggcctctctatggacctttttaaagtttatatggtcattaaaaacatcattgcacacatatactttgtaccactttggaagtagtgcaggcttgtttgaaagcatacacttgacttgtcttcttacttagtctcacagtattctttgtgagaaggttgatatgcccacattattctgtggccaaaaacaaaagtttaggaaatgaaaacagcaaacagaaaaccccatgccaagtgctgttttcgtagtgaggcactggagggcgctccgctctagcaatgggagatgcacgcagtctctgcagtctgcaggctgccctcacgaacgcctttcagaagatgtaagagttttttctgttcattttaaggcaaatgaaagacacatggatggtagaggaaatatttctatactgacctataaacggtccctttaaaagtttatgagaaactgaagaagtagctctgtgctccagccctccttatgacctcctctctccctagcctgttgcagcctcaccggcctcctcttctgggctgtgtcgtcagcctgaagccctctgtccctttgtgcctcagctcaaatgtcacaaatcagagaggtcttccttgaccaccctgtacaacatagcctccaccccgctaagcagcctctgcactaccctgtccccttactgctgttttcattttttcctattgccccatttccaccagacatatcacatgcttatttgtttattgtccgcctgtatcctaccccagcccccagatattcatgagagcagggacttggtttattccattgctactatatatccagaacctaaaacaatccttggcagtgcctgatataaatttgcagaaggaaaaaagaacagatttaggaatgaaatattttgagtgtttctaaagatttagtggattttttttctttattttggtaaattatacataacaaaattatcattttaacttttttttttttgaggtggagtctagctctgcccccaggctggagtgcagtggtgcgatctcactcactgcaacctctgcctcctgggttcaagcaactctcctgcctctgcctccgagtagctgggattacaggtgcccgccaccacgcctggctaattttttgtatttttagtagagacggggtttcaccatgttggccaggctggtctcgaactcctgacctcaggtgatctacccgcctcggcctcccaaagtgctgggattacaggcgtgagccaccatggccggcccattttaaccatctttaagtgtacagtttagtggcattaagtacattcacattgttgtacaactgtcaccaccatccatcttcagaacttttttatcttcccacactgaaaccctgtgcccattaaacactaactccctgttcccttccccccacccagcccctggtaaccaccattctcattattttcactgtgaatttgactactctaggtacttcacatacatagactcacatatttgtccttttgtgtttggcttatttcactcagcataatatcttccaaggtgcatccatgttacagcaggtatctgattttcattcatttttaaggctgaataatctattgtgtgcctattccatattttatttatccatccatctgttgatggacatttgagtatcactgccaccttttggctattgttagtgcatgttctatgtggagcacagaaatgtgatgtttaagtttaagcctaaagtggatttctttgaattatactagccagtcacagatcactcctgggtagtactatggtttgaatgtggtatcccctccaaaattcatgttgaaacttaattcccattgtggtggtattaagaagtggggccttgtaggaagtggttaagtcatgagggctgtgcctcatgaatgggttagtatcattggaaagaggcttcagagagagttttccagtcttgcccttccaccctgcgccatgtgaggacacagcaataaggcgccatattggaagcagagagcagccctctgtagacaccaaggctggcaccttgatcttagattccccagcctccagaactgtgggaagtaagtttctgttgtttataaattagcccagtgtgtaatactttttaaaatagcagcataaacagactaagacaggtggtttctacttttaggaaaatatttttagttcatattaagatagaaacttattctagctcctaaaaatcagaattgttttaatatcctcaggtgctctttaattttttcttacaattgtcaaaaacaagtttaaaatcaagttactaactctgctataggcaggaagctcctggatagatactctggggttcaagtccaatgctgacccgcagttggcccttgaccttgttcaaggcccttatctagattgtgccttatttttctcacccatcaaaaggaggatggacaagtttcttcctgccagttgacattccagagtctagaaaggaattattgccctcaagtaagacgaccttggggaattcagaaataaaaagtatatagctttttgagctctaagttattttggtccatttgagctcaatttgaccagagattgaagataaaagctctgcctcccccaaacttattggtacagcctgcactcaattggttttaccgccttctcctgacattaagggagatgtttttggttgtgtggtgttgaccctttaggtcctcagaaggggcggcaccctcatggtgtctctgcctgcagcagggagtgctaccaggcactttgttccagtgacttatgatggacacagcacagcgcctaggggttaggattctaaaataattcaggtgtatggagacgcagaacctaaaagaactcaggagaaagagaaggtagatatcctaaattttagtctgattttgactcagaagtggatacctgattttggcctacatttcacctctttcagtttttttctgctccatttgggttccctgctcacttggaaccctcaagctggcttgcaaatgcccagagccacagtgctctcatagggtctgcctgttctagggcccatcagccagcagtccagcagggatgaccagtgagcccaagaaaacaagcagtgctgatgtcagatgtgtagcccttctcaagtgctatacattttaagaaatgccttcactgggcatggtggctcatgcctgtaatcccagcactttgggaggccaagatgggcggatcacgaggtcaggagttggagaccaacctggcacaacatgataaaaccctgtctctactaaaaatacaaaaattagctgaacgtggtggtcacacacctctaatctcagctactcaggaggctgaggcaggagaatcgcttaaacccggaaggtggaggttgcagtgagctgagatcctgccattgcactccagcctgggtgacagtgagactctgtctcaaaaaaagaaagaaagaaaaagagagagagagaaagagagagagagagagaaagaaagaaagaaaaagaaagaaagaaaaaagaaagaaaatgtcttcttcagacacctcaactacaaaggagtcagccagtcaagagaatttctcctctaccaggaagagaatatgggtataggagaagcttggagtctctctgccacccctcatgttctctggacaaagtcccaagctgtgcgtttgaatcatcagtgtctacttgtcctgcagaacatcaggaatttaccaggtaatctggtgacatgcctgcaccagaggactgggagaatccttaccgttaaacctcttctccccacccctgaacacataaatacactttttaagcttcctaacgctgtactctgatcatggtgcccacccccttggacagcataaatttcccagtgacctccaattacctgccgctaaagtccaggccccttagtgtggcatgtacgcacctcctcacctatcctccatctttccatttccccccaggccgcttacctgtggcccacatgcaccactcaccatgccccacactctcgagtcatcagtgccacttcctcctggaagccttctttccctggacacctcagccagccatctgtctcgtccctgagagccctaacctctccgctgacttttgtcacccttccctgtgttaaggtgatcgagatgcagaactcccagtggtctttgatgcctcctctcctctcccacccacaccccatctgttgccaggcctgttgattttccccttcaggtgccaactcttctttcattgtattagtttcctattgctgttgtaacagattatcgcaaacatggtggtttaaattaagcttgtccctgcagcctgtgggccacatgtgacctgggatgactttgaatacgacccaacacaaatttgtgagctttcttaaaacatgagattttttggcgatttttttttttttccctttagcttatcagctgttgttagtggattttatgtgtggtccaagacaattcttcttccagtgtggggccagggaagccaaaaaaactggacacccttggttaagttaacacagatttgttaacttatgcttctgcagtttggaagtctgacctaggttttgtgggctgaaaccaaggtgtttacagggatggagagtgttctttctggcagttctaggggtgatctgtttgcttgcctgtttcagcttctagaggctgcccacattctttggctcatggctccttatccatcttcaaagccagacccagtgggctgaattcttctccccattgctgccatctctcgggttctgttgcttctgccacccttttccacttagaagcacccttgtgattacgttggccccacctggataaccagggccagtcgccccaactcagggtcagctgattagcaaccttcattccactttgccatgtaacctgacatatcaataaatactgggtataaggacgtggacatctttgggggccattattctgcatacccatccactgttatagattcaggtttgaactcttggaatgaccatctaatgggctgagttccctcattgcctctcatgttatgtgctgccagcatagatattaagatgtacattctatcatctagacctgttggttccaaaaacatctcttggatctgtccttttctttttgtctccattgcccctaccctagtggcaaacaatcctgtgaaaaaggattgtttacatgtatgggtgcccctccaggcaatattcaagtgtactcttcgaggctgttttagtacattcaccatattgtgcaaccatcacctccatctagttccaaaacattttcatcgccctaaaggagaactctatccattgagcggccattccccattccctcctctcctcaacccctggcaaccaccagtctgtcttctgtctctgtgcatttaccattcctttgtatggatatagcactacattttgtttattttttaaattaaatttaattttttagagacaggatgtagctctgtcatccaggttggagtatagtggcaccgtcacccaggctggagtgtagtggcatgatcatagctcactgtagccttggactcctgggcttgagtgattccccctgcctcaaccttccaagtagctaggactgcaggcacccaccaccacacctggctcattttttaaatttatttgtcagttgatggacatttgggctgtttccactttttggtgattgtgactagtgctgctatgaacattcatatacaggtatttgttttcagttcctttaggtttatacctaggaactgctgtgccatatagtaattctatgtttaactttttgaggaaccaccaaactgttttccacagtggctgcaccattttacattccaccagcaatgtacaagcgttctgatttctccacatcctcgccaacacttgctattttccattgtttttattgcagccatcctagtagatgtgaagttgtattctcgcggtttcttccaaatcatttttaaatgtacaaattgtctaatttcacttctctgcttcacatccttcctattgcatttataataaaccctggcccccatcttggactccaaggagtatatgatcttctccctcctacctctttctctcactgccttccatgctcctcactcagtccacttaccgagcatcattggccttctcctgttccctcaagcagggaaggcaaacacccatgggcttttatttattatttctttatttattttttaacacttccctccttaggtccagagaccatgggctttgaggctcaggggattcagatccaaggtccatttagaagtaaatgatgagatgagttgggcactgtggctcacgcctgtaattagcactttgggaggccgaggtgggcagatcatgaggtcaggagatcgagactatcctggctaatacagtgaaaccccatctctactaaaaattcaaaaaattagccgggcatggtggtgcatacctgtaatcccagctactcgggaggctgaggcaggagaatcgctttaacctgggaggtgaaggttgcagtgagccgagatcgtgccactgcactccagcctgggcaacagagtgagactccatctcaaaaaaaaaaaaaaaaaaagatgagatgatgcattgaatgctaggtatggcgtgtatgtagttcataagaacaccaataaacagtggatgtaaaaagcaacatcagatagatacctaaaggccatgtctttggaacaggggtaaccacctgaagcatgtcctcccttccctgcctttttcctccctcagagcaccccgttcttcattgcacttatgatttgtcaccagccacgaatgtgtgcatctccctgttatgtttggtctcctgcactgggctggaaactccacgttcaccctttatgcctgtgcccagcacagtgcctgacacagtaggcactgattaaatgattcttgaatgactgcatcatcatatggtcacagtaaacagaatccatcactaattatctatttgacatgagcgggtggaaaggcaaagtttttatgcatgagtgtgggtgtatgtatgttttcctagattatagatttgtctaaacattcctgctaattttaagatatcaaatctgaagtttccttggcttgaatttttgaacataggccaaggttgtttttagattcctcagtattctctcttttgtgaaagttttcaaaagtataaacggcgcatcttccgtacaactggtttacattgttggtttatgcagttgagttgtgggcagaggggaaacctcaatgtctgaatgtggctttaccccagcgctgagatatccccgggagagcttggccagtctgagtccatgtggcctaaagatcctccctagccagttccctgtcccacctacattctgtttatttcagaacttctcacctgttgaacacacagcccttcctcaacacaggaccagctcagcatcgggaagctgtattttaagaaaatcatggtcttccagctcagtggaggcatcttagcgggatccaaaataacattcgcttttatcttgaaattctttctgtttttggtttttccccaactctcatccttcccccaccttcacctcagacactccaggttattactgaaattaagcatgatagaaagtgtggactcataggctcagttctgttccctccttatggccagcgtgtggaagagctcctctgctctcatgccttctccatcggagctggttcatcaccttggcctgtcttgggcggagtccccgacttgggagttgtgctgttcgtttgctgtccatcgggctgtaagctccttgaggaccaggcaccatgtttactcacccctgtcccttctgggaacctgggggaaactgctaactggcgtggctctcagaccttgcatggccccacacattttttttctgtgggaaccactaagcattagcaactcgccagtgatcagcagggattagcagcgtttaggctccgcagacatttaatgtgctaattgaggagcccagggttcggccaaggaagtgatttacaaaggtggaaacgggactgttgacacaggtgcatcttattaattactggtttggggaattagtaaaaatgttaataatttgagggattattgttaatgaaggataagaaacttcacaaccatatggtttactacttgatgcgattttcccttttttaaaaaaatacttttaaatctgggttttaggaaggacaagccatttcttgcagaacttattgattgtattacataggtaaatggaaaaatatttcctagaacaattttttgtaacagaaaattctaaaacataccagtagtatgaagtaagaggcacctatggcacatctttgtattattcagtccctcctttatacattcttctgacaagaacgggagtcatgcctcccaggctctgagtcccaggctccgagcattactgaggcagctcctaagaagagagaagggaagaacatttcctgaggatctttgctgtgccaggttccagaaggtgctttggcgcatctcacgtgagatacgggctccttttgcctgctttctaagaagggtgcggtgtgaggtggctggctgcgtggaagaggcctgggaggagtaattccaccagtattgtgtcttagtcttcaagtggccagtgcagtaccttggcctgtggtagatcctgagtaaatgttgactgaaacgaagatgccatggccggtggtgaagcagggatcagtgcaacaatgctgtgagaatacagaggcaggggtggcttttggagggcacctggatcattcccagggaagctgccctctgggcagagtttaaagtatggcagagggaagagtgttcttggcagagggcacaggcccggtaggggagttatgagcaggtaattgtggagtatgggattcccaggggctgggcatgacgttgagagcgggggaggttgaggccagactgtgaagggattcccaggccagcccaggactgacttcagatttacatcctattggcaacaaggagccagtggagatgtttaatctctttcggcctccatcaagttagcctttcagtctgtaacctggcctaagtgttagtcccatgtcatttgaaccccttgcctttctcttttacttaaattacattcacagtgcgctgtgaaacctaattggaatagacaaaacgtggtggaactctgcagcttatggggccagttcatgctcaccttaatgtgcttataatgtacatttaaatactgccagttatttggagctttcaggtgacttcacttctctgtgtattatgtacttcgcttcctacatctgcagttaatttgttaagagaccttaatgagaaacttcaaacagtttaaatgtcaattaccaaaaaagtaaggttttcaagttccagtaatctacccgattggtcatcagaatgtagtcccaggtggatgtaatttaagacatgacattccagagcttcagttacaaagaatttatatatttcgggactaataaactggctccagtggtggctacacttgcaggattgtctgcagttatgactcatctagtaccggcgctgctcagaactttctgtccacggagttcacactggttttgtgtttgggctggtgcttttgaatctgaaaaaaagtgcataaaaatatgccagaaatgtagtaaatattgtgatcatttcattttttaatccgacacttttgagaggaaaagagtattcatcagtactttatcatagatttaattaatgggataatctttaatttctgactcagacatctggatttgtttcttgccaccccctcctttttttctgtgttcctttctcgtctttatttttgatgaagataaaatacttaaagaaagcgttgaatgtgatgatgagtattgttttaacagaaagtaaaatcaaaagcatgcagaataaattaaccttgcattttctcggcaggtcagttagtgggtgttatatccttagttgttggtgctacaaagtaaataatttttggcagctggtttagttttcaccacttctaagcctatgacaaatggtcttggaagatctttggtcttaaaaaggaaaattttctgtgtgcgagttttaagttcagttttgttgggttttgaagtcttttttatgtaagccacttatgtggcattttgttttatttgaatttgaaattttttttaagttttaaagctagagtctgccacattgaactgtttttcacacttggcatttaaaagttaatttgctttttctgtttttaaaagagactaaaaaactaaggtttcccctactaagcatttattagtcaaccacttttgaaaattgaaaaattagtttgtatggttttagattgtttttctcccaggagaaataatgttgctacataatctcagacctgcattcacgtatttagcctgccataagtcactgtcaaaatgaagaaaatgctgaaagttagatatacctgcacatgtgaatttcatgtattttctggtaatcaactctgttttaaaggcttttgggagttgttttctttcagaagcagcccactggtgctgtatttggcatgttgtgtgttattaaaacttcatataaatgcagaggtactaaaacgtgaagtttacaaaacccatcggaacatttttacttgtgtagttagcacgatcacttctccaagtacaataatctttgtgttgtgagcctgtagacaaaactcgtgtctggcatatctgattggaatgtgaaatttaatattttccactagttatttcccaacatgcaaagtgaactgatacccattaaatatatatatttaagtaaaaatagagaggatcagtggcctaatcagctttacagctgtgaatttaggaagtgaattcacaacatccctctctccagagagacgacttgatgacttactctcggtttctttaagtgatatagtagaccttgtttggattaatcagcagccttgggagttggagcagtcatttgcaatattgagtggaaaagttccttgtgcttggaaaagtcagaaggccaggagtgagagacatggcctcatcctttccctggtggctcctcacctgtgaagttgcaccagggtggtaataaaattgtaggagctcattttatgtgaaaccattagcagcctgggaattcaggactagctgcctttcatactttaagacactggaaggtgtcatttataagcatagagagcctgcaggaaggcagaacaggcttgtaaactggagcctgaggctctgggcagcaatcagtgtgtaatagagtttaaagtcttaggttatcagaatcacaaatgggcctttaagtgttgtgggcaaatcccaagaaacatctgtctataaaaggcaggtacaatggccagttatttcctcctggttattgtgatattgttattttctgtttctgcctttgtggatgggagtggggagagaaagggaggggcccttgctacaagtgtaagaataaaattgtaaatgtttgtgttagttgaaaaaaaattgactatggtaagtgtcgcagctaatgtagggtgttttcaccttgaaacagcgactgccgcccagttcctgctgcttcgttcgcggactctgaattccactgctggggcaggcgtgtgtgacaggcagagagagccctggggttgggggaacaaggaagtgtttccagttcccatttggcttatgcattggagggttccccaatgtggggacagcgtccaggttcttggcctgtggaaatgacaaatggccctgacagggggctatcccagcttcagtgtttctgttcaccatcctaagagtggttctttatctgaaaccatgaagaaaaccagatgattagagaagaattcaagaacccattctgtagacattgcctcctgacaagtacaaatgcgtctgttgaaatctcagtgctccaagtccccatctatccgccttccccctcctccaggttttagacaggttacctgattgcccctggttggccctcatcccctcccctatctgggcagcgctctccctgctgtggggttgggtggtcctcctgctcctgggtcatatggtatcgagagatgctgattccatctgcagctccttctctgtactgtggacttcactgcttgtctctttggccactaggaagcatttattctgattctcatgggcagcttgagaggcttcccacagagggaagggtaggcctttaatatttctgtccttcatctcaaagactgtttctttaaagtggacacagatgggattgggctggagagaggtggccccagcccaggagatcatgttgtctgggtgaaaccactgcacgctctggtccctgggctcctattgctcagggttcctttttaaagcccacttgtcgagtcttctttctttacagaggagatgttgtgcttaccctcttgtgaggatctcacagtgttctagcgcctctccttggagatggtatttactggtttgagggtgacctctgctaatggacctgttcagtcaccaggtacagggccttcagttgtgttgtcgaagaggctctgctcacccctgccccaccatatctgagaagtgcccgaagttagttggatgtggcttctctgcctaggtagccttgcacccctgggaggatgggggcctaagctggaagtggatttttctcatctagcagaagcacattcgatactggatacaaagccccatcttctgtttcagaagcagcttggagcatttcttgtttaactgtcatgtaagccccttaagcaatgcttttttcagagaggtatcatcctgataaattgtcaaatgcctctttcaaatccattccttttaaaaaaaatcctcttttctgtttattctggagtcactcatcatgcaaataatatctttgtgagaagtggtgttcctggagttggagaaggctctttagtagggctgctggtcagtacagtccctgaaaaacatgactatttataacacaggcaccagagggttcagagacgtgctaaaagtggagaagttgggggcaggggagtgctggcaaggatgaactttgcctatttcacaagttttgactaaagtagttctgaataagaaaagcgtttgatgaaatcttacctagtataaagacatattatttttggcctctcttttttctttcttctttttgttctttcacctttcccctgtgacctcccattccagctgagccctcttgttcccatttgccctgtattgttgatcttaaccccagctctgccctctcttaaatcctgttcttattcttggagaagactacagtctcccgagctctttctatatgccaagcactgtacttttatacattcatattatcatgaggaaatattcttttgcctattttacagatgaagcaagtgagattcagggaagttaagtaatttatccaaatttacatgcctactaagggatggagcaggagccagacccctgtttctgaagcatgtttgctgaaccactacactttagccacctactgtggatacctttggaaaggaggattcttttaccgttaccaaaaagatattaataaaaataagtccaggtgtggtggctcatgcctgtaatcccagcactttgggaggcagaggcaggtgggttacttgagctcaggagttcgagaccagcctgggcaacatggtgaaatcccgtctccacaaaaaatagaaaaattagccacgcatggtggcgcatgcctgtagtgccagctactccagaggttgaggtgggaggattgcttgagcctgggaggcagaagttgcagtgacctgagatagtgccactgcactccagcctgggtggcagagccagaccctgtctccaaatatttatgtgtgtgtgtgtgtgtgtgtgtgtgtgtgtgtatgtatacacatatataatttatatgcaaatatataatatatacatatattacatacatatatgtgtgtgtatatataatcaaatgcccataaattgaagattcattaaatacagggatagtcataccatagtaatgacgtagctgttaaaaagaataaggtagttcccataaatggtagaatagcttgattgtactaatccccctgtattttatgtagatttgtaagattcacaccaaattttttttttttgagttggagtctcgctcagtcgcccaggctggagtgcagtggcgtgatctcggctcactgcaacctccacctcccgggttcaagcgattcttctgcctcagcctcctgagtagctgagactacaggcacgcaccaccacgcccagctaatttttgtatttttagtagagacggggtttcaccatgttgaccagccaggatgatctcgatctcttgacctcgtgatccacccgcctcagcctcccaaagtgctgggattacaggcgtgagccaccgcacctggccacacacaaagtatttttaaaaactattgtaagtcaccagaaagcaagcaaaatcaggcagaaactggaggagaatctacctcaaaagacaaactgcggtggataaggtttgcaggtttgtagctttaacctgaaggtactcccaaagctaattaagtggccaaaagccgcagccttactgtattgcgatgttagagggcagaggtagaaactggcagagctggcagagcagtcagaaaattaagagggaaaccccagagaggagggagctacagagggcacaaacacccaaatctgcatatgaaattgcacaaatccttggttggctactaaactatgtgtctgcaaacctggtgaaaaagtagcagctttaagcctgaaaaaaactaagcaaagatcttggccactgcctaccatagggaagacagaacttggtatttgtgttcagccaagttagctgtctgctagaacaaaaattagtcttcagagaaatgtgcagaatctggaatctctataacatatcgatcatcatgtccagtgtcctatcagaaaccactagaggccgggcattgtggctcatgcctgtaatcccagcactttgggagaccaaggcagacggattgcctgaggtcagaagtttgagaccagcctggccaacatagtgaaaccccatctctactaaatatacaaaaaaaattagccaggtgtgctggtgggcacctgtagtcccagctattcaagaggctgaggcaagagaatcccttgaacctgggaggcggaggttgcagtgagccgagattgtgccactgcactccagcctggtgacagagtgagactccgtctcaaaaaaaacaaaacaaaaacaaaaaaaccccactagatagaggtagaaatgggaaaaaagtagataatagaagccaaactcaagatgatagagatgttacaattaatagacaaggactttaaagcatctaccataaatacattcaaagacttaataaaaatgtatacacaatgaatgaacagatagggagtatcagcttagaaatagtagctatgggccaggtgcagtgtctcacacctgtaatcccaacactttgggggcccaggtgggtggatcacttgaggccaggaattcatgaccagactggccaacatggcaaaaccctgtctctaactaaaaatacaaaaattagccaggtgtgggagactgagacaggagaatctcttgaacgtgggaggcagaggttgcagtgagccgagatcataccagtgcactccagcctgggcaacagagcaagatcctgtctcaaaaaaaaaaaaaaaaaaaaaaaaagagaagagaagaaaagaaataaggccaggtgtggtagctaatgcctgtaatcccagcactttgagaggcagaagtgggcggatcacttgaggtcaggagtttgataccagcctgggcaacatggcaaaaccccgtctctactaaaaatacaaaactgggcatggtggcacgcatctgtaatcccagctacttgggaggctgaggcacaaaaatcgcttgagcctgggaggtggaggttgcagtgagccaagatggcaccactgtactccagcctgggtgacagtgcaggactctgtctcaaaaaaaaaaaaaaaaatagctatgaaaaagagctgaaaggttagtggttgccagaggttgaggggaggagggaatgggaagtgattgtttaatgcatatggggtttccttttgtgttgatgaaagtgttcttgagctagtggtgaggcttgtacagcactgtgaattttaaactttaaaatggtgaaaattgtgaattttatgaaaagagaggtgaaaatacatgaactaaatagaaatttttaccagtaagctcaatagcagacaaagttaactgaaaaatagatcaatcgtatgtactcagtttgaggaaaagaaaaagattgaagaaaagcaaatagagcctcagagacctgtgggacagtaccaagcagtctaacatgtatagttggagttccagaagcaaaaaagagattagggcagaaaaaatatttgaggggataatgaccagaaatgttccaaattcggtgaaatccattaactcactgatcccttaacaaacactcagcaagataaattaaaacacacacatgcacatgagagccacattgctgaaatccaaaaataagaaagtcctgaaagctgcctgagaaaaaaagaaggtgcacagaaggaacaataatataactaacagccgactgcttatcagaaacagtggagagtagaaggtaaacgtattgaaagacaaaatatcaacccagggttctacgtccagcaaaactatccttcaaaattgaagcccaaataaagacctttataattaaacaaaaactgagagaatttgttgcaaagaatctgactatgagaaatgctaaaggaatttctttaggcttaagggaaataaccccagatgataacttggatctataaaaagaaatgaaccagaaatgatgaagaaaataatcagatagatccatctgtgttgatgtaaacatgtaatagtaataataataaatatttatatagcaattatttcaggaaggacacgcaagaaaactttaacagtgataaccttccccgtggaaaaggggaagagattgagagcttggagtatgaaaaaggagactaaattattattttgtgcttcttttgatcatttgaatattttttaatgtggatgtattacttatttttttaaataaatttttaaatgtcatgaaatagctaggaaaaatagagatacttgatacaagatgagaaaataatgttctgtttctcccttgtaaggaatatgacagaaatcgagacattgtagactgggagtcaggattgggtttctttcctactctgttagcaggacactgtgtcacgtgacaaaggctgtgaaggaggtatcagatcgcgctctctggccttgggcaccttctttccattgctaggtcttcttccccatccccagacgtccctgctcattcccggagcggcagctccaggaaggcacatcttgctctaaaatggcctcctgaacactcctgttcccacacactgtctggcttaatcttactccaaggcaggcagctgcagagggtgccagggctggttctgctcctgggttcccatctcgggtgatcaggacaccatcgtgtgctctgtcacccaagccagcagcctgagagtccgccttttaactcaccttgttaatgaccccaggtacgtttcattaggtcttcgtaatgaaatgtacctgggggtcattaacaaggtcaattgacccaaatccttctcaaatctgccgcctttctctgtcatgatttttataatctgcaccacgccccccacacccccaaccttttccaggatcaaattgagacttctccagtgtttgcagagtgaggtcctgtctttagcccaggccttcctagcctggcccctacccaggtccaaccttgttttccacatgtgagggtccaccctcatctcccagtgaggtcaggtctggccattcagcctccccttccacatgttcagccctcctggctttgcgcagcttattgctttttcctgtgttccttccttgtcttcacatagcaaatcattctcacctccagagatgctgtgtcctatgtcctagaagccttacctattccctagcatgctgaactgagtggtcctgtcccggcctcccataactcttgttaatgctctgtcctactcttggagagaccatgaagactgggggaagaggacagggtttggagttggacagatttggtctcaattctggtctttccatttactggctgtatgagctcaggcaagttgtttaatctccccagtctcagtttcctcatctttatggtgacaatactactgcttactttgctgagacagatggactaaagataatatatataaagtgcttggtgtggttcctattatagctttattcttacaacacttttttaaacattgtgttgattaaacatttacttgattaaatgtttttctctcccattagactatacattctttgagaccagcagtgcttaatgtttgtagaattcaacttttaatgagtttgaattttaacagagtacatttgctaagttaaaagagtgattatattaactttaattgtggaatttcacgtaatgtgaaattcaaagctttatatatattttcagcagagactcttaaaattatgttttcgaaataacaattttatctccccaagcaaaatgccacctgcacctttacaaacactttaccgcagttatgtgaaccttcattgctcacccttgctgcagatcattaaatgtatgcataaatagaattattaatgtttaccaaggtcttaaagtcctggtaagaaaatattgagtggtcaatatagaaaggtcacctgttagctcctgatgcttgaaaacagaggtgggacctggtgagcctgtcttcagctgatgcagtgccagcacatctgggctgggcagggcctccagtgccttctgcacaggttcacgtggccaactctgcttggacagtgggatctgctccctggcagctgggacacctgctccccactgttgagccattcctcttgccagggctgtttgagtatcagccactacattcctggccccctccttttagagagagatctctgattttaagaggcaaggtttaaagtaagacatttcatgtgtagtagcagatattattaactttgttgtgcacagtatgccttggatcttcttttcttgggtagggtacagataaaatgatggttctacgaggggtaagtaggaaaaattagtggttctggattctctccatgccttcactccattatagtcacagtggcaagatggagtattagcaagacaggtcctgagtgtggttgcggtctaatttaaacttttttttttagacttactctctcgcccaggtcggagtgcagtggtgcagtcttggctcactgcatcactgcatcccccagccaggctcaagcaattctcatttctcagcttcctgagtagctgggactacagtcatgtgcaaccatgcctggctaatttttttatttttagtagagacgggatttcgccatgttggccaggctggtcttgaacccctggtctcaagtgatctgcccgcctcccaaagtgctggggttacaggcatgagccactgtgtccaacctaatttaaactttatctttgtaagtgccagggtaatagaggctacccagtttgccattgtgctcacccaaagatgaaagtgctaaggttgagtggaagaattcccaattattaagcccctcctctccctgtgttgaaaattctccatgaaaacccatctctggaggtgtatcaatcagtgttatcactgccctaagccatttctgtcaaatccagtctttccagcatattgcatattccctgtcttgccagtgaaatgtggtaaagaagaaaaaagttgccacagaatgtaatttttaaaaccatagccgggcacggtggctcacgcctgtaatcctaacactttgggaggccgaggcgggtggatcacctgaggtcaggagttcaagagcagcctgggcaacatggtgaaaccctgtctttactaaaaataaaaaaggccaggtgctgtggcacgcacctgtaatcccagctacttgggaggctgagggaggagaattgcttgaacccaggaggtggaggttgcggtgagctgagatcgcgccactgcattccagcctgggctacagagtgtgacttcatctcaaataataataataaaaccataaaattcctacaaagtgtgaatatatatttatgaatgatgtctgtgtgtatccgtatacatacatccattcatatttctgaaaagctttcaaggagaatttttaaacatagcagatgcattaatttgcatacaaagaagccagttacggatcattcttatctagttatccaagtcaacagtgcctttttttttttttttttttgagacaaggtcttgctctgtcgcctaggctggagtgcaatggcacaatcgcggttcactgcattctcgaccacccagactccagtgagtctcctaccttagcctcctgagtagctaagaccaccagctacacctggctaatttttattttttaattttttgtagagatgtctccccatgttgccctggctggtctcaaatgcctgggctcaaatggtccccctgcctcagccttctgaagtgctgggattacaggaatgagccactgtgcccagcttaatgatgctattaaactacacctgttaaccttctacttgctttctgtggttgacaagtaattctctttgcatttctttttactaattcagatgggcttctcttttcttactccaaattattgaaagttatttatttgtgtaaaatattacatagacatacacacacacaatatatgtgtgccttatgcattttacaacatcatctgaacaaatatttattaactacctattgtgtttcagactctgtgctagacatgcgggatttcgcagtgatcagaacagtatctgcccaacagtcccacaaagaaatattaagcaagaataaaatctgtagccacatacctgtgtacattttttgagagcttactatgctctgggcactgtgctaacattttcaacattatttcatgtagcactctcaacaactgtgtgagataagttttatttattgttaccatttttccaaggaggaaaccgaaacacagaaaggttaagttacttgcctgaggtaacttagcattgatagaattaggatttgaacctgggtagtatgactcttaggtccccatgagctggcacacaggttgccaatccatcagttaaccttcccatcactgggtcagagagccaaggagcagaagggggatagaacttccccagtaccaaactaaggggctgagctgggatcgcaaccacaggttctgttccaaagctggggctctttcgacaaggccatgcccgccttgtctcttatgtatgctttttcacttgaggctgaattttaggtctgagtcaactgcattttgaaaaaaatcatctgcttgaagaccctgatgatgtaacaataaaggccattggaaaaccggcaatctgtgaatcttcatatagatgaaatatccaggttagaatttatcatcctaatctggatatttttgagagtgaaaggagtactgttatagatgctggggcatcaggagccagccaggacgtccaggcaagccggggcttgtggtcactctgtggacacgcagcatggtcattaatgcccacacaatgtgtgtattgttatttgtagattccattactctttggaatataaacctctaagcaagctaaaataactctactatgctttaattatgcattgttggtaaccataacaataaatccttggccaattccaatccaaggacataagcatttagagtcatttttaaaggagtgctccgatggtttagcagtcatgtaaatgcatttatatgtaacagaagacaaaaacaataattaagataaacataaaactcatcccttttgcctacagaggcaactctatttttagaactacaaatttgggctggatgtggtgactcttacctgtaataccagcactttgggagaccgaggtaggaggattgcttgaggccaggagtttgaaaccagcctggccaacgcagcgagaccatatctatacaaaagaaaagttaaaaacttagctgggcatggtggcatgtgtctgtagtcccagctactgaggaggctgaggcaggacaaccacttgagcccaggagttcaaggctgcagtgagccatgattgtaccagtgcactctagcctgggcaacatagcaagacattatcttaaagaaaaattgtatgcatagcctgagtacatgatttgaatatatttaggaaatagataatgggataaaatattcaaaagtgaaattatgcaggaaaattccaggcatgtgattgtcatatacatagttgaacatttctattctctatgtagtttagactttaattaaacagaataatctgactttaatctctcttgatactataaaagtaacttgaatttgttcattttttgttttttaatcatgaaaactaatgcccaaagtacctgtctaactcaaaataattgtttcttttttcacacaaagccaattgaatagattggacaattgcatacttaagatttaatatatttgctcatcatattatgggttttaaaaaatcatttatcttggagctaagtacatttcactatggttttttatgttcattgtcgtaaaatattatctttaatgtttcactaggttcactaatgttaggctgagggtgtttattgttgtatcagatatccttttgtgttttatttaaatctatatttactagttttaaatagtttgccttattgctaaggctagtggaaaatagttaaagtgtgagaatgtggtttttccctgtagtgttcttttgagtagttgacagctgtgaaaacatttagcaggcttccctccttttcagcgttggttaagctctgcttctaaaggagtattcctagcagagcttgccacagtatatccaaaacattgctgtattacagacgcaacatggtttaaaaggaaaaattgagtgtgggtttcaagttgacacatgataaaagtagccctgaagtgttcaattagaaactgaaggcctggatctgataacttcatgggcagtgcccctgctcttttgtcttacgaccaataggattttgactgctcaggaaatttgtatgcatgtacccagatatagacctaggcacctaaatgcacacgtggatatatacgaatatatggtggacagtgcagatccaagctactcctgctaacacatttctggaaaacattccctttatgggaggacttaacaaaaaaattagtagctagttttactttggtttacatatattgtttttctaatatagaattctcattagttggttttatgaatcatatcaccaaatgaaaatttgaaaagtatgtaacagttttctattgagcgttctctgaatattcttgccttcagtcctgctgggagccttttctcagatcaccagtgcaagcctacagtcatacattgtttgtagttgatacaacctcaatgatataagttttttgatgattttaaaatatgagtaattaatcatttataacctataggttaaaatgaattataagtggatgaaggtgggaacccaaatgaatcaaagctatttaagtttggtattgacattgtgcatcttcccattatttattataccaaaaaaatcactttatttcttaaaaatagtacaacacggccaggtgcagtggctcacgcctgtaatcccagcactttgggaggccgaggtgggtggatcacgaggtcaggagatcaagaccatcctggctaacacagtgaaaccccgtctctactagaagtacagaaaattagccgggcacggtggcaggcacctgtaatctcagcacttttgggaagccaaggtgggcggatcatgaggtcaggagatcaagaccatcctggctagcacggtgaaaccccatctctactaaaaatacaaaaaaaaaaaaaattagccaggcatggcagcgtgcacctgtagtcccagctacttgggaggctgaggcaggagaatggcgtgaacccgggaggtggagcttgcagtgagctgagatcgcaccactgcactccagcctgggtgacagagcgagactccatctttaaaaaaaaaatagtccaacacaagaaggaaagaaggtacagaaatggaaagttaagaatgaatcagtggagtaaaacatttctgagattggtgcattttccttttggaaatgtcattcaaaccatatgaaattaaatttggaaataatgttctgcagtctcttgaatgggatttaaaatatgacaatgcagaaaacacatatggggatgaaaacccataggacatgtctcaaggaggacagacaccctggggaagaacacttgtgagggtaccaggctctcagacacaaggaaagaggaatctgagggattgctgggaaggattctcatcttatgaccccagctgtgggtagatttggctggggagcccattctcattgcagggggcggtggcctcagccctgtgcatgctgactcttcagtgctgtgctctggctgaggcgtgcctctagtgagggtgaccctgggcaccgagcatattcagtcaccatcagccaaagctggttgtaggagggctggcggtggtcttgggaatgttgcttgaatccatcttggggtgaaaatcagagtattggctcatttctattttttatgattattgttattattattattattattgagacaggatcttgccctgttgcccaggctggagtgcagtggcacgatcacagctcactgcaggtcacagctcccaggctcaagcaatcctcccacctcagcttcccgagtagctaagacttcaggtgtgtgccacctggcctggctcattttttaatttatttttgtagagatgaggtctccccatgttgtccaggctggtctcaaactcctgggttcaggtgatccttctgcctcattcttcccaagtgctggggttacaggcatgagccaccatgcccagcctctccttcctgcctgcctgcttccctccctccctcccttcctccgttgctcttttattttctttccttttttttcctgttgctcaggctggagtgcagtagtgcaatcttggctcactgcagccttaacctcccaggctcaaaccatcctcccacctcagcctcccaactagctacagctacaggcatacaccaccacgcctggctaattttttattttttgtagagccaaggtcttactatgttgcgcaggctgctctcatttctaatacactgagctcaactgcttgctgggtgaggcctgcatgaggactttactcatgggctcatagaagcccttttaagctgcttagtgtccttagagtctccagaggcatccctaacccagaatcttttgactgtcctctggagagaaaggcagtaggtctgtaccaagaccaaggggcttgaaggcttggacgctctgcttccacctgcctctggagtggccagaagtaatgcctgttctcatgaccagccagtttgcctcactgctccggtgccaaaggccaagttttgattggaatgatgtctgtatattctgaataaccaggaattttgtttttctgatttacagatcttcaggcttttcatcagcatgatttgccatctctgtctttgtcatctagggtctgtaattatcctcaggttttctgccaatacctgcattttcaaccagttagaaaaagaagagctaaaacaggtagaagcctgaaaccaaggggcatatgcatttctgaaacattttcaagaaattgtctcaattttatatttctgtttataattataatttcaatgtccagtggaggaagttgtgagactcaatgtcagtagctaccacttactattctgtgcgcctcggttcagattgtttggggcagtggtgttttatgttgtgggtccaaacccatgagtcatctgggaagttaatttattaggtcacaatgagcgttttaaaaaatgaaccataggcccggcgcagtggctcacgcctgtaatcccagcactttgggaggctgaggcaggtggagcatgaggtcaggagttgcagaccagcctgaccaacatggtgaaaccccgtctccactaaaaatacaaaaattaactgggagtggtggcggcgcctgtaatcccaacttttcgggaggctgaggcaggagaatcgcttgaacccaggaggcggaggttgcagtgaatccagactgcgccattgcactccagcctgggcgacagaacaagactctgtctcaaaaaaaaaaaaaaaaaaaaaagaactgtaacataataggaaatattcaattctgagcccatcacacattttgtcttatgaaacttttggttttttatatgtggtgtatgtatgtatatgtggtgtatgtatgtatatgtggtgtatgtatgtatatgtggtgtatgtatgtacatgtgtatgtatgtatatgtggtgtatgtgtatatgtggtgtatgtatatgtggtgtatgtatgtatatgtggtgtatgtatgtatatatggtgtatgtatgcatgtgcaagctctcactataaatacacttcttcctgtgggttgcagtaaaaaaaaatttgaaaactgttaccttaagactatttattttaaaaattttaataggtacatagtgtatatatttatggggtacatgaaatgttttgatataggtatacaatgtgtaataatcacatcaaggtaaatagggtatctctgacctcaagcatttgtcatttctttgtgtttcaaacattccagttatactcttgtagttatttttaaatatataataaattattgttgactgtagttatcctgttgtactatcaaatactagaacttacttctttctatctcactggatttttgtactcattaaccatccccagtttccttcctctaccccactacccttcccagcccctgataaccaatattctagtctctgtccccatgatttcaattgttttaactttcagctcccacaagtgagtgagaacagttgaagtttgtctttctgtgcctgacttatttcacttaacataatgtcctccagttccatccatattgttgcaaatggcaggatctcattctcttttatgactgaatagtacttcattgtgtatatgtaccacaatttcttgatccatttagctaccgatggccccttaggttgctcccaaatctttgctattgtgaatactgctgcaataaacatgggagtgcagatatctcttcaatacactgccttcctttcttttgggtatatacctagcattgggattgctgggtcatatggtagttctagttttagttttttgaggaacctctatgctgttctccatagcggttgtactaaattacattcccattaacagtgtacgatggtttccttttttccatatcctcgctagcatttgttattgcctatcttttagataaaagtcattttaggccgggtgcagtggctcacgcctgtaatcccagcactttgggaggctgatgcgggtggatcacgaggtcaggagatcgagaccatcctggccaacatggtgaaaccccgtctctactaaaaaaatacaaaaacttagctgggcgtggtggcgggtgcctgtagtcccagctacttgggaggctgaggcaggagaatggtgtgaacacaggaggcagagcttgcagtgagctgagattgcaccactgcactccagcctgggcgacagagcaagactctgtctcaaaaaaaaaaaaaaaaaaagtcattttaatggggtgtgatatcttaccgtagttttgatttgcatttctgtggtgatcagtgatgttgagcaccttttcatatgcctgtttgccatttgtatgtcttcttctgagaaatatctgttcagatcttttgcccagtttttaaattagattattaaattttttttttcctattgagttgtttgagcttcttatatatcctggttattaatcctttctcagatggatggtttgcaaatatttttccccattctgtgggctgtctcttcactttgttgattgttttcctttgctgtgcagaagctttttaacttgacatgattccatttgtctatttttgcttcggtcgcctgtgcttttggggccttagggcaatttctgatccagggagagggctttctttaaggggtgtggggcatgaataagccaccagcaatgtcagggtatcttctttcctgtggctgagaaattccctaatttaaacttaggattctgtttgccatgaacatgctattaaaatagtggcaccctgggacactgtggggttcagtgggcttttgtgagctatcctgaggtcctaaccatcatttgtgacattttttccatggggaaaaattcattttcagttccaaagaagcaacttattggtgaattattttgagcaggatcctgtcataatcaggcactgcttttatattttttctgtattcagtagtaaatctacttgtaccttaagcagtcatcgcactcctttagccccttttaatttctaatgaggagtggtgtgttataggagtttggggtggcctgggggaagaagggttgctgaaggatggagctcctgaaagggagggttaatgaggatgtgtgtccaaagggtgaatgtctgtgctcctcaccagggagaagggcatcttgcatttacaatgatttataattcacctgggtcaggttcctctgactataggagccaattggttacagaaatctttttttttttttttttttttgagatggagtctcactctggcaccccggctggagtgcagtggcgtgatctcggctcactgcaacctctgcctcttgggttcaagcaattctctgcctcagcctcctgaatagctgggattgcaggtgcccgctaccacacctggctaattttttttttttttttttgtatttttagtagagacagggtttcaccatcttggccaggttggtattaaactcctgacctcgtgatccacccaccttggcctcccaaagtgctgggactacaggcgtgagccaccacgcctggctggttacagaaatcttaatataaggagctcgttacaaaggcaagcataccctagatctgcctgctagccctgcgatagctacttctcagtaccttctgtgccagacactcttctaggcccagggatacagcagggagagaggtgggcagggccccttcccctctggagaggctgctgctgggccctccgcacgctctggcctcccatgctttgggaatgcttgtcactgccaagctgtgcagtgcatcaccatccatggtgctcatgggcctgaggaccactctgcccacacctaaggggggctgggtggccagtgtttgaaaggcttataagaaagatcacaagaagtttcttcttgagaaatgctacagtctttaaaaacaaaacaaacaaaaaactacttagaattttgatagccccagctcaagaaaacaataggtaggacacaagcttgttcataggcagcagagaggtccaaagcaatgtgcctcaaatcaagacgtgtggctctgaaaaaccttcttagggaaggctcccgccccacctagagcttcccaattccatagtatctaaggccttgcaaaatctacatctgtcacacgcccccccggccccgccccccatcacaactccatagtgggaagaacttatttcagtgcctatttttcttgaggtttataaaaacaaaatgtgtgaagggaatgtatgctgattctcttgggactaattaaacaaacagattcagagaaagaaagcagagaagatttaggacagttaaaatgtaaaaaatgtaattttggggataacagccgtcaatttttccactcgagtgtttttccaaagggcagagggcaagaagcatcttaagtcctctcgaagctgagacacatttcaactggagatattagaagcaaatttggtgcccaagacaggtgccagattttaattacagttggcatttctgagcatgcttttggcagaggtggccatcttgttggaaaagccatagattttgacactagcagtatgggtgcccagttgagaacgattgcaaataatttccctcctattttcatcttgttggttgtgagagaaaacttcagtggctaatatttaaacaagatattctctgttcagaggaaacagttcattggaattgtcttggtggcttggtgtgttggctctgggggtaataatttctatcttaaagtctttaaaaccagttaaaacaataaaataggatatttcattatgagaaatgaagttggcatgcaccaggttttccattaagttccaggtcacagacaaataaagaaagtatgttcgggggggaaaaatcctttttaaaaataattagggagctgtctgttttgttcaccagatggaaaatccgtagttgtgggtggtctgtgttggagagggcatctcacaattggcaggactatgcctttaacttttcaagtcctcggacaaaaatctcaacgccatggactattcagaaggctccgaatgttcatcagtccttccaggtctgcttttctgaattttaccagttttctaacaagagtgtgtaagcaaaatgattatggaatgccgaaataaatagtccattgttcgttgaattctgaaacagcattcctgctagccctggttttttgtgacttttcttgctgtcaataccttatgatgataatctgattagtggagctgcctgcgttactatttaaaggcccctttttcttacatttctgtgttccagagtagatagggcagccagatgtgctaacagcataagaaatcatcataagcttgttatttattgaagatggatattgcactgttatcagtgtttagggtcttttctacacttgctttgattctggtcaaattaattcaataagaaaatgtacttttcttactcctttcttgaactgataatagaatgttagctacctagtgtcactagtattttttttatctacacatcaaggtatcatttttttctagctcagtcttatgttttacatggctttacatctgcaagttggactttgaaatgaatattttatgtttgaacataaggatatatatatttttatatttcattcatacatttaacccatccccaaaattttcttaaaaaacttaataattacaggagatgtaaattaataaaatcatctaggatgctaaatgcataaactttcaattgagtgaaaaaaagccctggaacgtaaatcatttttctcggacagccaatgtgtttggctttggatgtacatcagattctgcctgtgcatagtaaaaatggcaatgatttattagttccatctccccccagcacagatgctgcacagtctgtcccttttctgggcactaaacagtgggttttaaaaaacataatttcactcaagttttccgcttgcattctgtgttgtactattaatagcaaccctttgttattcatgccagctcgcttctagcataagacaatgatgtggggaaacggttttaactaaaatactactaattggcacccatttttcatatactggtgcaggtgcagttctgtgaggaatagaagcacctctaaaaattatgtcatgaagatagaaaagctaaacagttacacagttaagtaggtgtacctttgcaatgtcattgtttctttgaaaaatcttacttatttgccgataagttgaagggtggggaaaatttggaatattgatggaggacttatgtgttaaatgttctatgagtccaccaggcgctgtggctcacgcctgtaatcccagcactttgggaggccaaatcacgcagactgcttgagccgggagcatgagaccaacctgggcaacagagcgaaaccccatctctacaaatgatacaaaaattagccacatgtagtggtgggcacctgtagtcccagctactcaggaggctgagatgggaggatcacttgagcccagaagttggagtctgcagtaaacagtgatcatgtgccactgcactccagcctgggcaacagagcaacactttgtctcaaaagaaaaaaaaaaaagttatatgatgcttcatgaaaaaaaaagaaagttttcagcctgagcaatatagcaagacctcatccctacaaaaaattttttaaaaatcagactggtaggccaagcgcagtggctcacacctgtaatcccagcactttgggaggccgaggcgggcggatcacgaggtcaggagatagagaccatcatggctaacacggtgaaaccccatctctactaaaaatacaaaaaattagctgggcgtggtggcgggcgcctatagtcccagctactcgggaggctgaggcaggagaatggcgtgaacccaggaggtggagcttgcagtgagcagagattgcgccactgcactccagcctgggcgacagagccagactccgtctcaaaaaaaaaatcagagtggtatggtggcgcacacctgtagtcccagctactgggaaggctaaggcaggaggattgcttgagcccaggagtttaaggctacggtgaactatggttgtcccaccgtactccagcctgggtgacagaatgagaccctgtctcaaaaaaagaagttttcaagaggggaagaaataagaagagtgttagaaacctcagttgcccatctactttcctctccttgcccagggtgacagaaactgttgccaaattctcactggcagcaacttgagttttgatttggctcaggtacatgtgctcttctagagagtaaggtcagcacagaggctgctggagggtgctggaggctgcctccatggactctagcaccacctttcctcgtcctgtagctgaaatccttggagtcattcttgcctccactagacccttggattctgtgcatctccacatggctcccagccattgtggctctttttttctgggactctcctctctcctgtccatcttccagaagtagctttctgaacacagacgtcattgcgctcctctccacaagcagcagtcactctcaacactgaggaatgaagaccttacagtgttctttacaccctaacccaagattaccttcccagaatcatcttcctaccccatgtctctgaccttccaatcacattaaaattctcagggtggtgagatactccagctcctttctgtctctgccatggctcatgctgctgcttctccctacagagccctcctctcatcttccttgagatcttgctgaccaaatatcttctcttctgatgacttagcagtcacccacactgccgtgggccagcagacacccttcctctgccttccagtagctttgcccaatgtgatctctgctctttgtaccctgtgctgtctcccatgttagatccaaccacctaggtcatagcgctactgctggtacctgattgcaggcccagcatctgtcttggtgccaagcacatgacaagaactgaataaataggccaggtgaggtggctcacgcctgtaatcccagcacttggggaagccaaggcgagtggcctgacgtcaggagttctagactagactggccaacatggctaaaccccatctctgctaaaaatacaaaaattagctgggcgtagtggcgcatgcctgtaatcccagctacttgggaggctgaggtgggagaatcgcttgaacccaggagacggaggttgtagtgagccaagatcacaccactgcactccagcctgggtgacacagcgagaccccgtctcaaaaaagaattgaataaatattttttgagtgaaatggaattctgggttgtggctttccatcagttaagattcttggttgtggccaggtgcagtggctcacgcctgtaatcccaacactttgggagggagaggtgggtggatcatgaggtcaggagtttgagaccagcctggccaacatggtgaaaccccgtctctactaaaaatacaaaaaaattagccaggcctggtggcacgtgcctgtaatcccagctacttgggaggctgaggcaggagaattgcttgaactcgggaggcagaggttgcagtgagccgagatcatgccattgcactccagcctgggcgacaaagcaagactccatcttggggggaaaaaaagattcttggttgtaagcaacagacaccacatctggctttggcaagagggggttttcctggaaggatatggacacattcacaccgtcggtggaaagcaactgtaggcatgccgacatgaatccttctccattgtgtccctgctcagccacgagaacagtgtgctgccagggtgctcagtctgtaactctgctcaggatgcaggctccagggagggagtgtccaactgggctaatagggcccaccctttggctctgggagagctgggctccttgatgataatcccagcacactgtcagctgtgggtaggatgaggcaagttcctcagggggtgaagtgtgttttgggatagtcaacagccagtgactgttcaccacaggactaaaccttccatttccagtgctccagtgccccaactggcctgtctggtgtgatttgccaagtgttctgagcaagcagggaagttgtccattaaaatacagatattggccagacatggctcacacctgtaatcccagcactttgggaggctgaagcgggtggatcacttgcactcaggagtttgagaccagcctgggcaatatagtgagaccctatctcaattaaaaaaataaaaagcagatatcctgggaagggataacactatagcccctgctagccagcattgatttgccaaaagtaggacctgtgggtgcaggatccagagtagccatggatggatgaggtgcgaaagggtcccgaatgttccagcaatgctacccaaatggcaagtggtgtcgtggcctctttcacctccatactcagggagaagccactcagaggcctccacataacaggcaggctctcgcctgggtgtcggaggtgaggatgctactgaagcttattgcttcttaagaatcaatcaaatcaaaacaatggatgcccttctcccaagtggaagggctgtgctggccaccttgtatgactgacacaaagttgggaagagttgcagtcatgagctggggagacacaccctaaaagcagatgagctggtggcggtaaataacactcccatgacgacaagtgggctttgcacgtgtgtggtagcagggcatggccctgggggaggtggggctacctgaggaaaatcacaggaggcaggaatgtatactgtttgttgggaaaagacaagccaatctgaagggcaagggtttgtagaggggagtggtggagagtgaggttggaagggtgtttgggtccagttgtagacagccttgaattctaggcaaagacttcagatgttgttttctaagcactaggagcacctgtggatgtttcagaatgggagtatcatgatggatgtactattttttaaagagcaggaataagcagcaggccactgctaaggaatctgtgtcatgaggctgttagcctggggacaaggaggaccggccaaaaaaaaaaaagtcctgtatataagggggagcacccagcacacttaggttccagacctccattcctagcaactcacctgtaactcctggcaggggtctctgcctccctctactcatccaaagatcatggtgcttgttcaccagccttatgatgatccaaagaaatagtgatctttcatgtttaaataaacctacttaattacgtgcatctgtttggaaattcagacacaccacatgagaagctactgggacttttttctccttttcttggcttctcatttgttctctagctttttctttttttttcatcctggccagttattaaccttctcctccacttttgagtctcataattgtccagatctcccaggacgctgacagtgtggttttggttcacttgttccttctcctgctcaaatttcaattgattcaagggtgatatgctgggtatgatgggctggacatgcccattttcattcaactcatccataactaggatataagtgaggatacagatttgggtgttatggccaaaagatcttcaaatacaatgactttatcaaggataatttcttcccccctcacttgaaacatggttaggtggtgcagggctgataacgatggctcagtgaggtctcaggctcctttagctatggttctgccaacctcagcacatggcacacatcttccccaaggcggctgcttggtttgctcccaccacgtggggtagggggacacatgccttcctttatggggacactatatttctgctcaccctgaccacatcccatcaatcagaactttgacccatgaatacactcagatgcaggagaggctgggaaatgttttccttagctgggcatccatggacctctccctgggtccatcctagagagtggagtagcagcatttgcaccccagacctgaggggtagctgaggctgggctggcagtggggagtgaggccaggagcttggatgtgcaggctggcatgtcccacacatatggggcaaagaggaggggctggctggggctcgtgtcctcctccgtaccctcatcccaagccccagtgcggtagggtgggctgctccaacccaaatcttcttctcccaagtcttctctttcccagcatattatgctgcttccatttcaccatagtttcactcactatcaaggtctccaaagcaatcccatcatctacatattacttgattgttgtgtacagggtattgggtgaaaatgaaggtgggcagagcacatagcctccaacctcaaagccagtaatgtgccagatgaaaggtaagtcacagtctttagattcagtagcattttaacaaaactaaaatgtcaggccggatgccgtggctcacgcctgtaatcccaacactctgggaggctgaggcgggctgatcacgaggtcaggagatctagaccatcctggctaacacggtgaaaccctgtctctactaaaaatacaaaaaattagctgggcatggtggcgggcgcctgtagtcccagctactagggaggctgaggcaggagaattgcttgaacccgggaggcagaggttgcagtgagccgagatcgcgctccgaagtccattctttctgtgcagtggctgatctatcagaagaagaacccccttccccaccaggcctaagaacccatgggagtgatggcccagcactatggtgttgcatttctttcttttttttttttttagacggagtcttgctgtgtcatccagggtggagtgcagtggcgtgatctcggctcactgcaatctctgcttcctaggttcaagtgattctcctgcctcaacctcccaagtagctgggattacaggcacctgccatcatgcccggctaatttttgtatttttagtagagacggggttttaccatgttggccaggctggtcttgaactcctgacctcagatgatctgtctgcctcggcctcccaaagtgctgggattataggcgtgagccactgcgcctggcctggtgttgcatttcgttactggcaagatgatgtatgctctttcacgtgcccacatgcaaaggtgtgactcatggaatgaagacagctcagcaacctctagttgctgggacagaaatgcaagtcagtgggctctggcctttctcccaggctgtgttgccaccttggtggctggaggggcgctactagggggtgtgcttggcagagcctggggtggcgtcctctttcatcccactaaataacacattggtggcttgatctgccatgaagctgacaatcagagcaagtatttgaagcctgggaagctgtgtgggccttgcttgtgggacctggtgtcagctgatgacgtggccctgtctgggtgcccgtgagtcagatggcagggatggcctgacatcatgaacactagctccacctacgtcacattggacttgactctttacagagcacctaggaagagatattgatgagtgaaccattgcccagtcatcgagttaattatttccccccagaaaggttaacatactgaggacagagagggcatgtgtaggcggcagggcgcacttttcatttagtctggttcgcaggtgcggtcaagacgattccttattgtcttggagccagcccttttaagccttcctgcacagctctgtgacagtctcgcggggagacctgtgaggccactttccttttttccagacccacccccacctttgagattatcactcttcctgctttgttttctgaggctttttggctttttagtttatttgtaattagagcagaaaaggtacagtaatcggatagaagggttgggagtgatagaatgagccaggatgcggtggagaaatggggtggagaacccccagaccttagggtggcgtgtttgtcagggagtagaccagggtgcagttctaggcagaccactagatggcactcacacattggtgttcagtcgggtccacggcactttccactttgggcttctgtaaaatctccccatgaactagccaaagctttgtatctgtcatcccgccatttgtccctctaacctctcttgatcgtctacagataggtatatatatatgttcctctctagttcatttttctcttaacatttagtgaccttaaaaacctggcagaaataccttcaaagcctcccaccttgttagctgcattgccgcatttttactgttctcctaagccaatgtttacatggcagtaaatccatgtttagagtaggtaatagagaaacctgtttctctctcagtcactctgagggtatgtttgataaagaaatggaaattgagaggatgagttattaaaaggattaataggtaacaaatttttttaaaatttccattcaaaattatgggttggtaaattgtaagatacttaaaattaatgagttgttttatcaaatcattttctgttgttagagaattttcagcaagctgagattcaaatgcaaaatgtcttattgcatactgctggctctaggaaggaggagggacagacaggaaatcatggttgatgttatctttaccaaggtgcatgtggtgtgaaagcaaaaccccatcttaaattcatcatccgttctgatgttgcacagaaatgaaaattaatttctatatgtcaactaaaatggattctgctcctgcctggttcaattctgtcttagctgcgtggacatcttggggagctgctctgatggtacatgcagacgtgcttcatctgtgcacttcttagctgagataacagtgctccgagccccactgttaaggttaacctgtatactgcagaaggacaacagatggaaattctggtttgcagccactgcagaaaaataaaaacatgttccaaagggaaaaggatcttgtatttctgcgtttgaacctttgatccgcattcacatctgaagggagggctaaaccttttggtggagacacatggctttgcatctgtgaaaacacagctgtatagagcaaaacaaaactagtggaaaatacaatggttttgctgtgtcaggctcaccgctaatgcttgaattctatataaatattgtcttttgatagttctttcaaaaatctttcttgactttccatataattgtccaataatgttattcttttaaattcagatttggggctttttaggattaaggcacaaatgtctcttttcttttaaaaaggcagtaaaataaacagattgtagttagatcataataacatctaaattttgacctaattagagggggagatggggaaaaaaactctttaaaagaagattaaggtaaagttctaactttatccttgattctgaattttttttcttttttggaaatattgcatacattttatactgcaagttacaatgtgaagggcctttgaagcactctaaagagacttagctgctttgttttgagcaattaaggtttgttattgagtgaattaagcagctctgctgtggctcatctgtaaatagtggtcttcagcgagtttcttgatccgcttttcccaggaacagaagccaagtcggcttccttaggagctgctcgccctgagtctccatgtttcctcgcagtccggggcagaacccaagcccgtgccttcctcgccctgccttcggagtttcctgctattgacctggcggggcgcgccagccctccctgcccgctggtgccgcggtccctctcggctgcagcagtggggcacagggacgtcatggacaaaagacgaggatgccagttcgatgtgcgagcagaaggccgcctgcgtgcgctctgcagagcaaccggcccggtttcataaggggccgccggcaggggactgccatggcgccccctcctaccctttttggcaccagcagcttcatccgcaggcccactcggggtgaatagtgtgggagctctcaagagaaagaattttaggtttgtcgatagtaatcaccaccttcagcgctcctcccactgctggagagaccgcggactgggtgacaagtcttccaggctcccagaaagtttctgctgcaaagcgcagggtccgcctcccacttccaggagggaccaggagggaaccatcgcgaaaccccgaggctgccggggactctgactgaggcctttcctcctgtgtccctctcccccacgccggcctcccctcctttcaactctctgcgctttgaaaccgcggagttggggtagctaggccctccagcccggcgacaggcctcggccacaggcagcggggcggggtgtggacaggaacaaggaggtggggtggggaggaagcctcgggcagagcaggttctctgcggagtttcggcagccgggtttatccattttgattaaagaaaagtaaaaaaaatcccccaaaaccaaacaacaaaaaccctctcccaacccccaacccgcctccacagctgcattttgttcctgggactgttggtgtcaccagagcctctttttttatgcaatcctagactccattgcaaaggacttgtaaagcctattaatttttcaggcaaaacagatcaagcctgcctttgatgctgctgtttcctaatttagtattcaaaggtaaagaatcctactaccgtctcttcactttttacataattaaaagagatttttcccccaggggcaaagaactagttgcttagtattttttgaagtgaaaggtctaactttatatcacatctgtttttatgctctttcctaaacataaccaatatttactctttgctggtacttagttgcatgctattcacccttgcattttaatttctgacagagaggggattagtattcctcttctaaatcatcctctaagctatgtgtgtgtgtgtgtatatatatatatgtatatatatgcgtgtgtgtgtgtatttctcctctaacaaactgagagtgcaatttaaaaaactgtagaatcagtgattgccctaacttgtgcatgactcttgatttcacacaggagcattcaaaagttccgttaagtgggctttcacaggtttccatctgctgtgtttaatagcaaattgcgacccttcaaaccacttcaaggccttttgtgttcttatctgtgcatttcaatacttgctggggaagtgccttcagtttcactacatatgcaaaaagccaggcttgaattttttgacacccccttttcatttgttggtggagtcctgttttctattgtttgcttgttgatgttggcaaaagtcatttatttaatgatgccaggaatactatgccctattctttattggcaggaaatcctaaaacatccgggagtagtttaaaaattaatgcatgccgttgaaacttacatattggcatagttttattttcccatcataaggtagatgatattttaaaggtattatatagtaatagtcaccagaagccaattaaaaccactaggattctatcaaaaacctgtttggcggcataaataattgatatgtggaaataaagcagcattctctgggcaggggcctcctgtacagacctgggtggcgttagcagtctctcttctgtgaaccagggggcgatttctgggcataatatcacctggatttaaaaaacttaataataaggccacacacgcatttttaaaaaaacttcccttgcctgtggagacagagaggagatagcgatgttattttcaggtgtttgagcttcttagagaaaaagaaacaaataccagactccttaggagctaggtgcgaatggaataaattgaggcactccagcgacacatccagcttgttttaaatgatgtgattaaaaaggacatctgagaacaaatttatgaagttgttatggcaactgaaatacttggattgaaatgtgtgtatctaaaacatgaaagattgcaggaagccggagaaacaagcaaagcattgtgtttgggaaaggcaattgaacagtggtagccaaatattattcctctgtcggtcatccttcagggtaactgcctcggtttccacttttaaaaacgtgtggtgattgatgctttcatggactctgttgccccaagtccccaagccttgtaccagcgtttgctcattggtcctttgacctgttgagaacacaatctctgtattgtgttcaatgcagggatgcatttagagttgcccctgcatctacccattaagtttatactcctgtgttctcatattaacgtctgtgtttgcgaatagtctctctagtctttgattcactaactcccccaattctaacccaccaatggccaccaacaaacagccacactcaaaggactcaacatatttaaatattccctagaattctttgctctgttctaaaagctatgtatcccgtctacataatttgattctattgtaatttctcatggttttaaaattttccttaccagtacttgtaagagtattgaataattgtttctttcaatcacaggcaaggatatttaaaattaacatgtggaaatgtgtgttgcagtgtgttgaaaaatcagtacttgaagtcacatctagaatgcttccgattttttccatcattagatttcagatgcagtgtccaaaaaaattgtttttaaaaaatgttgctacaaatttcttgcaatatattttgggtttttcactttaaatgaaaaaatagttaagtgtcaattttagtgattttagtagaccatcccattaaaaatatgctattttaattgaaaaaaatttttgacaaaacacatttacaccgaaaaattcaaacaaaataatttcttctttaacaatattgattgttaaatgttgattaccaagttatttggtctccttaattttaagcataatactctttactttgaatagtcttaatccctaaagcaaagcaaagtaaaagagaaaaaaaagtagaagaatttccagaaaattgtaattcccttaaaccatgaattagaactttttactcttactgtagttactctagtttttttagttagacatgagggtacaatcaaacagcttcttttttgtaacagattgttttcctacttcttgaaaaactgagatcaaaacatttttctattctgttgcaaaattaactgttgttattctgtcagacgagttattcactctaaatgtctttttaaacctgtatatttatttttttatccctttttgcatatgcacatggaagtgattccattttaatataacttttttattttgaaaacccataggttgaagatgatataatcagagtaataataaggatgctccaagtatattaaacataagaatttggggtctttgttacggaaatagatttcctttttcctttctttagtcttactgttttaaggattttttttaaagtatgattttgatgcttccaaagtggttgctattttatttcaggtgggtcatttgatagtttgttgatgttttcaaggtctctaaacaaagtctgatgtgttaacagtcttattaacgatgttaaaatagaattaacagcttgtggatgcctccagagcacaatagcctgtcagcctcccctgcccccttataaattgtgcccctgctgtcatccctttgtttcaggcccaatcagcaaactaaacttttgtgaagagagaaggcagttcaagtgtttctgccgcagctgaagggaggagctaatgtggaatttattgggagaccaatcagtgctggagggaagaatgaccccaaattggaagaaggactttgttgacccccttggctccctgacctttccttgctattttgtccctttaaagaggtttactttggttgtcgtttactttgtgatgcttttagtaaaagccccagaagttttaaaagttttggatttaagatccctctcagcacagatttaattgtgccgtgtgattttgagtaacttgagtagatgttaacactcagaattattttttaaaaatctgacacaagctattaataattttttaaaggagtagaatttcattgattctcttgagccaaaatagattctaaatctcttctagtatctctttcctgtagttactttcatagagaatcagattagttactgatgttagactattggttctatttcgttgaatttatgctttaaaaaatagatttgtgtattccaaatctttaaaactttttttttttttttttttggtcaggcagtaattatagtgagtcagaaacaaatatttttagaggaaccctttttttttattagtattactagtaacaaatttgacaaattgtcacattttaaagtacagatttatgggatagcctgacaaatggataccacttttcctttgctactgtccaatttaataatttataaagtgtggcatatttgtaaaatagttacccattctcactgagcattacaccagttttggtaagggatactgagacattgttaagaattaagtattttttagattgcttgagcactttccttgttcccttatcagcattcttctcccttgtaatgtggtttgttgcttatatttactttgcaaccggccactgttcaaggacttcagacagtgctgaggtccgagatggtcactgctggtccaaagaacaaacatctcaggctagatgcaggacactaaatatgttcttcaagccaaggttaaataaaattactcaaatgtagccaaatacggggaatgagatgcagttaatgaattgtggctttgaaatatgatcatttgccaaggaatatgctgtgatgaaaacggagcagtgtaaactcagcacttctcttagctcgtagtgagctgctcaggtaaaccccgaggggaatactttcttctactgaataaaccctaaagataggcatccattgattgaacagtgtctgaaactggagcaaacagggcgccgtttgatactagccccatgtgtgggtataaataatgttttccagttggcatccttgagttgtgctgcttgaatagggccactttacgtggctgaagaagaatgtctctgcagtagttctccctgagcagtaactgcttggtacctttcacccacagcacccattgctgcccatccccatcccatgtctagtgtgccctcacattccactgctggtcagcagaaccatcttatcagaaagtgtcaccaagcccttttttggtgtgcccgctgaatgagcactccaggctgtggagttcgggacatgccttggtttgtggggaccatgctgcctgcctgtcgagaccaagcatcgatactgtgtgtctacctgatgaaagtgtccagtatgtgtctgcatgacttggggacactaagaaaaccaaagggattagcaacaaagagagcttgtcacctttgtgcggaagccagctggcatctcacagggacaacctacaacctgagctgctgcgtcctcactaaatctgggcccctagggaccccgttttactcctgctctcctggagcttattacgggcctggctaccaaagggaaagaggggaaaatagaccaggagccttatgctagaaccatttattttgtttcacgtgatgcagacagagataaaactgcaaatttaatgaaactttaacaatcagtacaatgtttctccttaagaactttgtaaatagcatttatctttcaagagttctttctctctttttgtgattattttataaacttaaaggaaaaagagaaaaagtcagtggttccagcatttgctttagtctgtgacttaaatggattataactcttgaccgctgacatttaccaagataaatcagtggtcatagatgtggagcttgatgtctcttcggctctgggaccaatccccttggacaaaagttttcctgtgttcttagtattctgaactggctacagcaactttaaggaaaataaaggttacaaaaaaagttctgacaatttgtttgcttttacattttcaaatttgtgaaatgtagagataattttgttttcaaatctttgtaattccctgaagcaaatactttcaagccagttgcaaaatgctgctttagaaataattcatataaacatgcttctctatttaatcacaaggggagatgtggagaatggatgttttattttttcagtagtttttgctctataaaaatattaaattgctattatgattactaaagatacctttgcgtagtactttataatttccatgtacttttataaacactattacatataatctttgaatgagttctgcaggaagatattattgtcctggttttgtaggtgaagaaacaataaatgcacacattcataacgtgcgacgtagtgccagctttgtattgccagaaaatcattttaagaaatagatttggtatgtaaaatggctagaaaacacaacacaaatttggaacgaagaagctgttttgattccacatgatctctataaaatatgaccaaaaaaaccgggaaaataaaatcatctgatcatgtgcaagtccttttttagtacacaattaggtgaatcttgtttttatgattgcttagttttcatgtttataaaataccataatatgccccataattatagcataataataaaataggaaaataacatcttccttttaatttttaagacaaattataatcacaatattatagcagaagaatgtttttcaattaaaaagtggtttggttaaaatatgattttttttcttctaaaaatcccaaaatggccaaaatatatttaaaaatatatttgttatatatatttttatttaaaaataattttttctcccacttgttaaagattaagtggcataagtatttgttttggggcaattcactgccgacattcagaaacagaactgtattattgggcacaggaaaatctgattagtgtttctaagaattagtatagcacagcaagacagggaagcagtccaaagtgctaaaggttaaaagcaatttataaaaactaggaaaagaccttacttgcttaaaaaaaaaatttcttaataattaaaattgtctaagtgatattcttgaatattttttgtaatagtttcatattattttcataaaaatactttggttgaggcagcagcagaggaggaagaattaatataaagaaaacaaattttcctattttgcaagatccaaaatcttatgaatatagtttttagtgaaaaaaattattaaacttttacacagtaaccctaagaaaagtctccacatatggtcccaaaggttaaaaaaaaaaacccaaaactcctctggggaaataatcatttcatgaaaagcagtctatttggaatttcactggagacactctgagaatcgaatcgagcttaatttctgtctttgtgataatcaaatatacattttgcattctagaagtttagaggaggtattatatgtccatggttttctttaaacaactctaacgtcaaaatggtcaaactgttggactgattcatgttagataaaacagatgggattctcagatcgtgcaccgttcagccgtttgatggaattcgcgccaccctgaccagcgagcccagatggcgcttaaatctgtcactctttaacgaccctactgttttttaaaaatatttttatatttgagctcattcagttaatctgagagattaatcttttccaagatatgtctggggagggctttactgagggtttcacttggaggagctcagggagagtaagaagaatgatgaggcctcttggacacaggactacttgctagaaggaacctggggaagaagggctggtggtccttgggctttggaatatttttgaggcaacaaggcccagaagtgcacgtgaagagtggtagtgacgggggttaagggaagaggggatggatggggagggcgtggtgcagggaggtggaggtgaacactgacatcgctgagacagtacagcccctgccaagaagcttagatctcagtaaggggccaagtgctgactgtgaccacacctgagtggctttaggcagcctgaccttcactgcatggggatgactcggtgggtgtgccccaggagcagagcccaagatgggctccaatgtgataagcctctgggatggctctggaaagaacctgttctgcaccacaactctcacaaatctcatggggtttttttccctgtaggttttttcccccctttcttaaattgttatttcgagccagtcagcctactgaaatgcttcagtcatttggggtgtaagatgttggccagctcccgaatctctaaccttggatacatttgcagagtggcttggaattgctttctattcctgctggggtaagaaagggaaaaatgaatgatttttcattatgcacacatggtattttttcccgcatttgaatcagatgtagcaggtgtcaaaatatggtacagaatttacagtattaatgtgaaaatttctactgtcccaaaaagccaccagagatggacaaacccacctatgttaacaaaagtaaaaatgccctgctgtctttaaagatgttcctggtggtatttgggctgctctgtgctagtttttctggggatcacgtgatgctgcctatacttgggggtcttgtggaaagcagtggatgcctctcaccctgcatagaagacgggtccaaatgtcttgtgcccacctgagtgtctacacactgaagacacgttagaggtctgctttagagaggttttcctcctaaattaaggatctatgactttcacatagacccaaaagtgagcagagatgcaagttgtgttgagaggttcttttggaagatgtggggctttgggggtcttggggactgggggactgtcagaagtcactgctctagtagaatgtggtgggaacttataacaacagattctccacagaaatgccacacgtaaccatcccttgaggatggagccacgtatgctgtaaacagagtggaagaacatcaagctcgtaacttgtcattttcatcataaatctgctgtaagcttgcaacagccacggtttccccctccccacccacatacacatagggacattatggaaaggattgcagtatagtcctacttaaagaatcttgctttttttttttttttttttttttagaaaataaacaattgctagaagagtggagagaccacttgcatctaactctgtggcaggtttaggattctgtgtaatcagtaagacagagagggaatgtgtcaactggcctcaatttcctagtagttttgggtgtttacagagtacaattgaacattttaagggaagcaacttgtggtgcctgcattgaaaatcattttgatgaagttatggaatacatttgatattatctaaaaaacaaatctcctacttttttgactcagatatttctagtagtcaaaataaacattcgctcttaaattttactagtcaactcatttcacattcacctgattccctctaaaaacaaaaatctttctactattccaattggcaaatggtctgttttggaacaaaaggatagatgcatttgaagaattctctggtcacctgagaaatgaaggtttgcccatcattttttattaatgcttgccaagtaattaggtatgaaaagatgaggagcaaaaataaatcttcatcttcaatagaacattagaggctgggcatggtggctcacacctgtaattccagcactttaggaggccgaggtgggaggattgattgaggtcagaagttcgagaacagcctgggcaacatggtgaaaccctgtctctacataaaatacaacaaatagccatacatggtggcacatgcctgtagtcccagctacgtgggaggctggggtgggaggatcgtttgagcccaggaggcagaggttgcagtgatccaagatcatgccactgcactccagcctgggcgacagagtgagcccttgtcttaaaaaaaaaaaatctttaatagaacactggcggccgggcatggtagctcacgcctgtaatcccagcactgggaggccaaggcaggtggatcacctgaggccaggagttcgagaccagcctgaccaacatggtgaaaccccatctctattaaaaatacgaaaattagctgggtgagatggcagttgcctgtgaatcccagctactcgggaggctgaggcaggagaatcacttgaacctgggaggcggaggttgcagtgagctgagattatgccactgcactccagcctgggagacagagcgaaactccatctcaaaaaaaaaaaaaagaaaaaaagaatattggctatttgagcaagatgaatgtattttggtagatagaagaaaaatgagaactatcgctcatcactgctgatgtctaaatcccctccctgggcatgaggatggtacaatgacacagcaaccccagcctgccgggcttctgggatgccaagctgggggtgtcctggccaggtccaaggtgctggaagccaatccagaaaataggatgaagggataaaatcacactccaaggccgtgatatgattgaatcaaggtgttaatctaggtgaagagtgcagaagccagattcactaggggctccagggcaggacaagctggttcagcggggagaaggcaggaggcagatgcccaagaagtgtgggcagatctaggggtgactttataggccctcagcttttttttttttttgagatggagttttgctctgtcaccaggctggagtgcagtggcgcgatctcggctcactgcaacctctgcctcccaggttcaagcgattctcctgcctcagcttcccaagtagctggaactacaggcatgtgccaccatgcccagctaatttttttgtatttttagtatagaagggattttaccacgttgaccaggatgctctcgagctctcaacctcatgatctgcccgcctcagcctcctaaagtgctgggattacaggtgtgagctgccgcgcccggccaggtccttagctttgaatggggagtgaggcattaggggcatggagacacgtgaagaacatgtagcttgtcctttcttccttccagagctttctctagccatttgcaaaaattccacaagcacattatgcagtcatttttctaggaactggagagaggggagaggtggatgggaggggagggtgtcataagccttgaaaaagttagatattccaaagaaccttagcttttcccaaataggaaatggagagttgggtggtagtttcaaatcattatttcattttctttacctctgaaaagatttcttagtttactgagagcctaccttcaattgcatggatgttgtacattttctttttcatttcccatgaagatccctatttttagcttttaagagctgttactcacaactgagatacaaacagtgttctgcaccccacacagcatatatctcatgattagtgacagggttcctagaactgcaagacaagtttgggcttactcaatctgttaagtttccttataggcatattttttcattctattgttttagcaaggggcctattagaaatttccatgtgtataaatgacactttaaagagctgggtgcaggctgggcgccatggcttacgcctgtaatcccagcattttggaaggccgaggcaggcagatcatttgaagtcaggtgttcgagaccagcctggccaacatagtgaaaccccgtctctattaaaaaaaaaaaaatgaaaattagccaggcatggtggcatgcacctgtagtcccagctactcaagaggctgaggtatgagaattgcttgaacctgggaggcggaggttgcagtgagctaagatcgtgccactgcactccagcctgggtgacagagcaaaactccatcttaaaaaaaaaagagctaggtgcagtggtgcatgcctatagtcccagctacttgggagactgaggtgggaggatcacttgagcccaggagtttgaggctatagtgagctatgattgcgtctgtgaatagccactgcggtccagcctgagcaaagtagcgagaccctgtctctaaaaaagtaaaaattaaatttaagaagttcttcaccatccaagttatgttacgtggaatttcccgtggcagtttcctgaaacataacttgtttatgtttcctgaaacaaaacttacctgcagtttctagacacgtgctctaaaaacaggcatctactggcctgttttaggatttagaaatctctgctctgcccttctttcaactatccaaatgaaaagaatgttttaacatttcatatttgtgaaagtttcctcaattactgacttttttcagttttacaatttgtttttggccaaaacaacagcaacaacaaaaatacgatttaactgcaaaattgaccccctgatcttagctacaccttccgtggtccttttctaccattcagcttgaccctccacccatgggaggtctctgctcattgggaatactgggccatgaaacatctcaatattttccatggtctttactttatgcttgctcctcttctgttcttcatacagcaagccagagaatcagatcatgtcacttccctgcatatctttcaaaacatcccattgaacttagaatacaatccctcctccttactgtggccaccaaagccctgcattgctggctcctgctgacctctccagcaacatcttatgccactctctcccttgtccgctgcccttatgacacaccggtctcctttcagtgcctgcggtatacagcgagctagttcctgcctcagggttgttgcactagctggttctgctgccagattctttctgtagctggctccttgtcctcttgaggccctaaagccttccctaccatcctattttaggactcttatcctcaaccccctgccatgattctctctcacagcatcctgtttctttccttcatggcatttatcacagtctgtcaatttttgttttttgttttctcgtataatgtttgtcttccctactgcaggccaaagagtttgagctgagcagggagttgctactgaaagtgtttgatcaggggagggtatgattgcactttaaggagattgatctatagccatggacaaaatagatttaagtgcttggtgaaggcaagggagagactgaaacagaaaagctaagaatagaaaactactgtaggctgggcacgatggctcacacctgtaaccccagcactttgggaggccgaggtgggcagatcacttgaggtcaggagtttgagaccggcctggccaaaatggtgaaacctcacctctactaaaaatacaaaaattagccaggtgtgatggtgcgtgcctgtaatcccagctactcgggagactgaggcaggagaatcacttgaacctaagaggcagaggttgcagtgagccaagatcacgccactgtactccagcttgggtgacacagcaagactctttctcaaaaaaaaaaaaaaaataataaaagctactgcaaaagtcctcctagtaggtgacagggactcaaactggtaggtgagaagggatgtgtgagagactgcccttgtgcctggactcacgtccctgacttgtgcacctccctcccaagcacacagtccccttctcacatcctcgccctcactccacccttcaccgtctccttttgggtgtcacctctgaggcaggcactacaggccttctgggtgattcttgagtgatgggtatgtctcacatctttttgttgatgatacagttcctttatacagagctgtattgttattagctgtcgtccctcttgttagagcccttctcaaggaagaataaatacactgtaggtgactaggtgactcctggaatcttttcttcgggaatttctttttttttttcttttttttttttttgagacagagtcccactctgttacccaggctggagtgccagagtgcagtgttgcagtcatagctcactgcgaccacaaactcctgggctcaagtgatcctcccacttcagcctccagagtagctgagacaacaggcatgcactactgtgcctagctgcctatcagtttttctttactgggtaagtataaatatctaaacatccacaagacatggaattgagagtctcttttctctgtcacctagtgtatttcaggtctataataaatattatacagggctgggtgtggtggctcacaccgataattccagcactttgggaggcttcagcaagtggatcgcttgagcccaagagtttgagaccagcctgggcaacatggtgaaaccccatctctaccaaaaaaaaaaaaaagttagccaggcgtggtggtgtgtgcctatagtcccagcttcttgggaggtgtgaggatcacttgagcccaggaggttgaggctgtagtgagctgtgattgtaccaccacactccagcctgggcaacagagcaagaccctgtctcaaaaaatatatattaaacagcaacaataacattttacctcatttttctccactgttcattttgtttgaaaatctgtgtggcaaaactctatgcccttaacccttaaagttgccattagccagatgatggcaggggaagggcgcatgggatcttcagcagtccttcatccatgcgcccaatgggtattgaggagccaccatgttcagggcactggggagatccatccatgaacagaaccaaaatctgcccccctagagcttacaattcagcaggctgatggtaacaacagagataaataagttggtcatggagaattttagaaagtgtccagtgtcatggtgcaacagaaaaggtgcaacaggggccaggcatggtagcttagcctgtaatcccagcactttgagaggctgaggtaggcagatcacctgaggtcaggagttcaagaccagcctggccaacatggtgaaaccctgtttctattaaaaatacaaaaattagccgggcatggtggcgcacacctgtaatcccagctactcagaaggctgaggcaggagaatcacttgaacccgggaggcagaggttgcagtaaggtgagatagcaccactgcactctagcctgggcgacagagcgagactccgtctcaaaaaaaaaaaaagaaatggtgcgacaggggcaaaggaaatgaggggaggcaggatgctattttaaatagggggtaaggataagccccattgagaaggtaatatctgagcaaaagtttgaaggagaggaaggacttagccttgaatacttttgaggaagaatggtctaggtagagcagccctgtgtgtccgtggttagcagggagggctgtgggctggtgtgaagtgagaggggtccacagcaatggaggtgagaccagagggggaaccagaggccagatcgctggaaggatgttggctttactccaggtggaatgaggagccattgcagagtttttaaacagatccctccagaagttatgttgagaataccatgtaggagacgagggttgaagtggggagacccgtcaggagatagttgctgtgagacaggtgagagctgctggtgtctcaaactgagtgagatgtacctgggatatgtttcgaagcagaatcaatgagatttcctggtgggttgagtgtttctcagttggaaataaaagaggagtcaaggatgactgtcaaggtttttggtttgtgtgactggagggaaagagtggctttcaaaatgggtttggcaataaatggagcacgcttttgttggggtaggggtggaggtcaagagttcagctttggacatgttgaatttaagatagctactagaattcgtttttttttagctactagaattctttttttttttttttttttttttttttgagatggagtcttgctctgtcacccaggctggagtgcaatggtgtggtcttggctcaccgcaacctccgcctcgcaggttcaagcgattctcctgccttagtctcctgagtagctgggattacaggcacgtgccaccatgcctggctaatttttgtatttttaataaagacaggggttcaccatgttggccaggctggtctcgaactcctgacctcgtgatctgcccatctcggcctcccaaagtgctgggattacaggcgtgagccaccatgcccagctgatagctactagaattctaagtggaggtatgaagtaggcagttttggggagagaggctgggtctggagatgtacgtgtgggagctgttagcagagaaatggtatttaaagtctgggtggggtgacttaggaatggacacagagctgactgagcagtcacaccccgtttccccacgaagacctcagcccaaggcaaccactaatctattttctgtcttaatgttggacactccaacattaagggatgcgtaagaagaagtggagggggaaccagcaaaggagatggagaagtcatgagcagtaagataggatgattaccaaggagtatatgtcctgggaaccaagtgaaaacagtacagcaagttgggagggggtgattgcaccagatgttgctgccactgggtcagataattaggaaaccaagaatcgactattgaaagctggatgcaatggtgcttgtctataattccagccactcaggagactgagatgcaaggatggcatgagcccaggagttcgaggctgcagagaacaatgatcgctcctgtgaatagctgctgcattccagtctgggcaacatagccagaccagaccctgtctcttaaaaaaacaaaaattgggctattggatttagccacgtgggggtcatgggtgaccttgacaagagcagatttggtagaagcatggaatggatttttcctaatattcctcctcttcaggggcagacaatatttaaatgaaaccgtatttggagcactcatcaggctttaatattgatgctgcatcttctactgtcacatacataaaggggaccaggaccactgcattacagatgtgactatttctaccttatatatgtatgccctatatgtgtatatactttatgtgtctatatcagctttattgagatataatttacatctcatacagttcacctatttaaagtatacagttcaatgaatttaatggtttttagtctattcagtgttatgcaaccatcaccatgattaattttatttctatcactgtttcttcagccccaaaagaaaccctgttcccattagcagtcactcctccttttcccccaaaaccctcagtcctaggcaaccactagtctactttctgtctttctatatttgccgattctggactcttcatatacatggaatcatacgatacgtggtcttttgtgactggcttctttcacttagtataatgttttcaagcttcatccaagctgtagcatgtggcagtacttcattcctttttagggccaaataatattccactgtatgtactaatatataccacattttatttattcattgattagttgttggaaatttaggttgtttctactttttagctattatgaataatgctgctatgaacatttctgtacacattgttgtatgggtatatttcttctggggttatacttaggaatggaattagaatgcagtagcatgatctcagctcactgcaacctccacctcccgggttcaagttgttcttgtgcctcagccccccaagtagctgggatcacaggcactgtgcctccacgcctggctaattttttgtatttttagtagagatagagtttcattatgttggccatgctggtctcgaactcctaccctcaggtgatctgcccgcctcggcctcccatggtgctgggattacaggcgtgagccaccacccctggccacagactggcttccttccttccctccgtccgtccttccttccttccttccttccttccttccttccttccttccttccttcctttcctccctttctttttctttttctatttctctttctctctctctttcttccctcctctcccctcccctcctgtcctcttctctctttctgacagagtttcactcttgtcacccaggctggagtgcaatggcgcaatctcggctcactgcagcctccacctcatttgttctcatgtcttagccactcgagtagctgggattacaggcacctgccaccaggcctggctaattgtttttttagtagagacaggatttcgccatgttggccaggctggtctcaaactcctgacctcaagtcacctcagcctcccaaagtgctgggattacaggcatgagccaccacacccagccttcttcattctttttttttttgaggtggagttttgctcttgttgcccaggctggagtgcaatggcacaatctcgacttactgcaacctgcacctcccaggttcaagcgattctcctgcctcagcctcccgagtagctggcattacaggcatgccccaccactgggtgaaaaatgcccagctaattttgtatttttagtagagatggggtttctccatgttggtcaggctggtctcgaactctcgacctcaggtgatctgcccacctcagcctcccagagtgctgggattacaggcatgagccactgcgctcggcccatcattcttaataatattcccaaatggtgtatagataaatactgccacaatttcaggactagaggttaaaaaaaaaaaaaggacaaagttggacagtagagctgagagcacaaattgtcccctttttttcccaggtccttaggttcgtagacctgtgtcagccataattactgctgaatgtgactcctgtgtatacggtcatttttattttttctgttcctggaggtaatgcaataagtcacctcaaaaagggcagagaatgagggagagaatctacctgcattggcgtattgaaaagatcagattatttcagaatccagatcattgtttacttttagctgcataaaaatatccaagtagattttcttataacctctccaagataaagatgccagaaacggcagccaaatacattgactttgagagaggaaaaaaaaaaagcttgtaattgccgatcactccttagatttacttctggggagcatcaattaaaaatctcaaaacacgtggctttttcagtaaaattatattaatatggaggaagagtttttattaaatatgagtgcacgtgtgtctgtgtctgtgtgtgttttaaacgtttccataatgagttcccaagtgcttttttggcagtagttattaaagcttgtgtgtttgcgatttatctggcaaaatgcctttagtgaagaaaggatatagtgttctcttggttctttgcccaaagtaattttggagaaatctgtgactgtatttagttcatgtcattcattggagacaagtcattgtaattacatttgatcacaatcagtttacagttgttttatcatgttttcatgctgaatatctactcagacatcatagcaaaatttaatggctactgttttatttgtacataaaaagatttatagcccttttttgcagtacacatcgggtttcaatcatcactgctacagagtgagaggaaagctatggataaagaactatcagaaatccttgactacataaaattttatttcaggtcaccttgccataaaagatattgaatgtattttgtggcttttcctcctgacatgctaaccgttgtagaagagttgcaatatttggaggaaaccgtatgaaatgtggaacttaattcacttaagatggtttacatttgcgcgtgttttccactggaaatagccatgccagccttatgaatggcccctgggtaatgcagagtaaaaggcaatggcattaccgatattgttgagttttaaaaggaagttgtcttcttaaccatacggctgaacattttgtcattgttgtttcagaaggtctgctctaacatctgcactgcggcagagttgtgttacagggtgttatttacagctgccaaatgctggaggctctcatgtatcagacagtctctgatttgctaattgtggaagccttgattcaccagtgaatttgggtaaattcactagttatctcctaagtgtcacttctcaccatgccttatttttcccaaaaggttgattccaagctctgctgaaatctgctcttggtctatatgtttgagtctacattgttgaagaagctccctttagaaaagtgtaattaatgggaaactttgacatccagctgagaaaattagtttgcatcaaaaaaggcaagatagaggattaaagaaattttagtcctaatctaattaacaccaattaaaagatgcagatgaatttacaccaacaaattgttaattatgcaccaatttgccttttttctgcaaccaaactgaaatcaggaaagtattattatcttttttgtttgaggagacttacattgtgggtttgttacaatcatcttttatataattaaaaggtaggcagaaagagcgtgaaatatttcagtctcctgacattttaatttaggttaactctttaaaaatacaaagtacagaaaaaaaaaattccagaaagtacaggataattctattagcatttattcactgactagatatttattgaggacctagtatgtgctggacacttaggtaaccattgtttctctcactcaaaatattttaacttgtttgtatttctaatatattgctcattagaaaaattgtatacgccaggcgtggaggctcatgtctgtaatcccagcattttgggaggccgaggcgggcagatcacgaggtcaggagattgagatcatcctggctaacacggtgaaaccctgtctctactaaaaatacaaaaaattagccgggtgtggtggcgggcgcctgtggtcccagctacttgggaggctgaggcaggagaatggcgtgaacccgggaggtggaggttgcagtaagccaagattgcgccacagcactccagcctgggcgacagagcgagactccgactcaaaaaaaaaaaaaaagaaaagaaaaagaaaaatagtataagctaattgtaccaaaattgtataagctaattaaattctgccctggatacatgtcagaaaaggagaatcgaaattttgggcctcaagaaatgctcttaatgtcccagaactcctctttaatgtgaccttttagggtattcagcgtccatcttcctcacccggggaatctgtgtttgtttcccagtgttactcagatctccactgtgctgggactttctttttccttgtgaatcactcttacagctcctcagatggtgatctgagtaattatgtagagggtggtgaagcacagaccttttagatctgcaaatgacacatctgtccaaatgtcatgtaatgagtaaccacaatccactttatataagccatatttcttctctttccaaaatgggaaggagagggtggggggggaaatgtctggtagaaatgggaagaaaagcatttctatggattcctctagccattaattacatagaaaatgccacagctgccctcagatttccaggtgcacgttattaaacgtcattcaaaggaaatgtttggccaactagatcctgatgtgagaaacagcatcctaaagagctatgtatgttactgtctaatgcatgtacttaggcattaaataatattaaatgaccatattaccttcttggggcaatagttaatataaacatttaggatgctcagtttgtacttttcagtatttgtgctggaaacttttgcattcacaactttgaaaactggctcgtgttttcatgggaagtgtcagtttaaagttggcctactaattaatgggggaatttcaatatggcagtgcctatgacagcaaatgaaaagcattctttataaacatcgtcttcctccacacattcacaggttagtatctgacacccatttttaatttctagagcaccatttgtacttctctgtggttttgcctgcaagtcttcgatgatgcagtccacccttccataaaaacgtactccaattttcctagattctactttcattgttttgtgaatcaagttagaaggtacataacttagcctgatgagatggcattcataaggttaggatagcagagttgcctaactaatcttcctgttgcaatgaaataaaagaatgatatctaagttgaccaaccttgtaaaaggtaattttacaagaggcctccaaaaataacggactaggactggccagagaagaaaataaacccctcatcctcaatccagaacccagagtttgtcatcactagtcgaaaagcttgtttgttttatacctaagtgagaccttgagttatccaatgtgcttccatcacagaatggcccaccagggtagaaggattctgagtgtattccctgatgctgttgccatgtgcctatggaatacctatgctccatatttagccctctttctgtgtagtagcagagacgtggatggctgctgaaactaagggcccagtctttggccttaggacagaccactgggtttctcccactgcctaaaaccttagtagcattagcatcagacatggacccaataaacaaactacctagttgataagcgccgcatttttcatgatgttttactgtggcctatccacacactctttcctattccatgaaaggaagaaaaagataatttgagttgtcctataaattaaaatttttcctttgtgattattttggaccagcgccataacattcagaagattatgagtggagtctttagtctgtgaacaaagtcctaagaaggaagtagtgctgtaacttacttcatctaaagaagcatcatcgctgaatgtaaagagtgattctggattggatcttaagccggaaaaataaatggagataaagtacgttattgggataatttgtgatatttaaataaggcctgtagaatagatactagtatcgtacccatgttacattttctgatttggataattgcaataaagttgtgtaggagagtgtccttggtttggggaaccatttaagagtataggggcacaatgaatataacttacagatggttcacggaaaaaatacaggtgcatactatataaaaataaatttatatctgcatatattatgcatatctacctatctatatctgtatttatacatatggagagagagagaccaagagagacagagagagcagtaatgataaagaaatgtggcagaatgttagtgctaacagttggtaagactgggtaaggagaattcaggaattatttagctatccttgcatttttatttttattttttttgagacagagtctcccactgtcacccaggctagagttcagtggcacggtctcggctcattgcaacctccaccttccgggttcaagcgattctcctgcctcagcctcctgagtagctggggttacaggcatgtgccacgacgcctggttactttttgtatttttagcagagacggggtttcaccagttggccaggctggtctcaaattcctgacctcaagtgatccacctgtctcggccccccacagtgccaggattacaggtgtgagccaccactccctgcctccttgcatcttttctgttagtttcagattacagtcatgtgtcacttaacaatgagaatacgtcttgagaaatgcatccttaggcaatttcatcgttgtgctaccatcacagaatgtatttccacaaacctagatgttacaacctaccgcacacctaggctgtgtggtatggcttattgcccctctgacataaacctacacaacatgtagctactgaatactgtaggcaattgtaacacagtggtaaggatttcttttcttttctttttttttttggagacagagtctcgctctgtcgcccaggctggaatgcagtggcgcagtctcggctcactgcgtcctccacctcctgggttcaagtgattctcctgcctcagcctcctgagtagctgggactacatgcgcctgccaccatgcctgactaatgtttgtatttttagtagagatggggttccaacatattggccaggctggtttcgaactccagaccttgtggtctgcccaccttggcctcccaaagtgctgggataacaggagtgagccaccgcgcccagccaggggtaaggatttctatatctaaacatatatgaacagaaaaagggtacagtaaaaatactgcataaaagatttaaaatggaacactcacagaaggctcttaccatgaatggagcttgcaggacctcatgttgttctgggtgagtcagtgagtgagcagtgagtgaatatgaaggcctaggacattactgtcactactgtagactttgtaaacactatatacttagactatactacatttattaaaaaaaacaaaaaacttttcttcagtagtaaattaaccttagcttactataacattttttttttcttttgaaacggagtctcattctgtcacccaggctggagtacagtggcgtgatcttggctcactgcaatctcagcctcccgagttcaagtgattcttctgtctcagcctcctgagtagctggcactacaggcacctgtcaccacgcccggctaatttttgtattttcagtagagacgggggtttcgccatgttggccaggctggtctcgaactcctgacctcaggtgattcacccacctcgccctcccaaagtgctgggattacaggtgtgagtcaccacacctggcccaactttttactttataaactttatatatatatatatgttttgttttgttttgtttgtttttgagatggagtcttgctctgtcacccaggctggagtgcagtggcacaatctcagctcactgcaacctctgcctcccacgttcaagcaattctcctgcctcagcctcccaagtggctgggcttgcaggtgcccccccctacaccaggctaatttttgtgtttttagtagagacatggtttcaccattttggccaggctggtctcgaactcctgaccttgtgatccgctcacctcagcctcccaaagtgctaggattacaggtttgagccatcacgcctagcctgtaaactttgtttatatttttaactttatgactcttttatagtaacagtaagtttaaaacacacattgtacaaaaatatttcctttatctcttattctatatgcttttttatatttttaatttttattttttatactttttgaactttttgttaaaagcaaaaacacaaacacatacattagcctaggcctacacagggtcaggatcatcaatattactgtcttccacctctacagcttgtcccagtggaaggtctttaggggcaataacacgcacagagctgttgtctcctgtgataacaatgccttcttctggaatgcctcctcaaggacccacatgagtctattttacagttaactttttttttttttaataaggaggcgtatagtctaaaatgaagataaaatgtaaagcataatataaaaccagtaacatttattattatcaagtattatgtactgtgcatggttgtattgctatatatatataaaattttttttttttttgagacagagtctcactctgtcacccaggctggagagcagtggcacaatctcggctcactgcaagctccacctcccaggttcatgccattctcctgcctcagcctcctgagtagctgggattacaggcgcatgccaccatgcctggctaattttttttttttttttttgtatttttaatagagacgacgtttcaccatgttgaccaggctggtcttgaactcctgaccttatgatctgcccacctcggcctcccaaagtgctatgattacagatgtgagccaccgggcctggcatgtttgattttttttttttttttttttgagacagattctctttctgttgcctaggctggagggcagtggcgcgatctgcaacctctgtctctcaggtttgagcaattctcgtgcctcagcctcccaaatagctgggattacaggtgcgtgccaccacacccagtttatttttgtatttttagccaccgggcccggcccagtataatcttatgggagcactgtggtatatttggtctgttgttgacctgaaagttatgtggcgcatgactgtatctaaaaacaaacaaacaaaaaatttaaatagaaaagctggattccgaccacatgaatgaaccttcttatgattctggaaggaaggcaggttctactaagacagggttcttaggctactaccactacctcacccataaaggatcagccttcttaacccagccagtcacaagggattctgaggatgaatgttcaccagggcagattggttatgttcaacagcttcatgtatttctgcaaaatctaccagtccgatgatgcagtgaacataatgatcccctgtgaaataataacaagataaaatgttcccaggcccatttgtttcccactgctaccaccccataagactgaaccatgggttggagtgaacacttgaaccaaaggttactgtattgtatgttcctgttcacacaggacttcacaaaaaccttcttttataaagaaaacaaccagccaataaaacagcattagagtacattatatatgtgaccaattgtttgataaaatctgatgtaagccttcaggcgtaattggagttcttagcaaaatactttggtttttaatatttctatgaccctctaagggggacttagcaattactcttaaattttcaaagtggtgcatggagttttagctgtgtgacttccattaaagtccataggagtcttgttgctaaaacatcacacaactcacgaaaatgtgccccttcttgtgaaattgttagaagtaatgggtatggaagtatagcacagcatttctggtacatttacaagctttctgtacttgtttcaaactttatacctttatgaaaactcaatagttctacaaaaattgaaggggggaaaaagcctattatgtgtattccagaagtgaagggtagaaaaaatacagtagaactaataaaaaattaaaataattcttcaagaaaagccaatgtttcaacatatttataatctttatttcaaaattaatatatcctctcctgggtttttaaagtaagccttaaaatcgaacttaaaaaaatgaacttgactgacaaagtttcactataaccacatacaatgattttgggtttcagcaacctcctctactgaaaccgatataatttaagcatcatcggagcaaaacttcactcctttagatggttggtggtgtgaggggtttgttcccagtggataagaggatggccttaaggtttgctgagtccttctctctcaagaacctcttagaggccgggcacggtggctcaagcctgtaatcccagcactttgggaggccaaggtgggtggatcacttgaggtcaggagttcgagaccagcctggccaacatggtgaaaccccgcctctactaaaaatacaaaaattagctgggtttggtggtgtgtgcctgtaatctcagctactcgggtggctgaggaacgagaatcgcttgaacccgggaggtggaggttgcagtgagcggagattgcgccattgcactccagcctgggcgacagaacaagaccctgtttcaaaaaaaagaaaaagaatctcatagacatttttctcctgcgtccctgtgataagagtgctgtgattcctgctatacagtcaaacagattcagagcccacctttgactccaggaccaaatttccccctttattctcttttgtgctatgctggagaagacagtgtggcagttcccgggaatttgtgtggagctgtttcagggacactctgagctaagaaaagggtgagagccctgggaggagaccttctttcaatccaggctacatgctctgagtttttccagggcatatatagctgctccatttggactatgctcctagactgacatgggcctgactcgcaggagccggcagctcctagtgctgagctcaccggctcggcccagcaccagcaccacctcccctctgagcatctggtggccttgctgataacacagtgacacagccatttccttctatagcagaaacatctttggagttctgtttccacagtcctttgagagacactctcgaggccaggagctggcctcagacataaaagtatttgtttcaacagagagagagagagagagagagagactcagtgactgctttttgagtgaattgttgttggctcagtttcagtaatgcaatgttttgctttagattaatttactaagcagtactaaagtatcatttatatacattattgaatcttgggatgattctgtaagcattactttctcctgaaatctccacttctgtctggatagtggattttaggataggtttttaaaatggaaaacttgacgcagattcaaattttcaacacagcattgaacgaatagcatcagttggggacgagctatgccaccaatttaaagtgtctcagccggggtcagaattaggaactgtctaaacagggaatttcagaagggcaggggaggatatcaaggcacaaatgggaggaaataagccattgttcctttagaaagcttagtaacctcgataatgagaggctatgaaatagttctttttataactgtaacttcttaacttcccagccctaatagctccaagggtcacttgcagagagctccggggctacacctgccttgcatagattagggcccgctgcagctgtcttcatttgcaagactaaggtgtagctccaagaggctgtaggtctcagcatggagcactcctcctcaatctcaataggctggtgttgcggattaagatggccattgcaagccaggctcagaaattgcaagatgaggcaggtaacgatttcctgggttttatgtatcaggccttatgaggtatgaagcgggaaaccttttatatgcctgccttgaattagccataccttttacaatcagctctgttgaagagcagctgcctggactatctagcatacccatgggccaggcatgcctttggcacacacacaggtttgtaaagagcttgtgaatctataggatgatctcttggtgaggacagaagggacccatagctagtcagcatcggactgagggctggatccactttttcctgtaatgtgcgtttgtttcacagaaaatacaattaggataattcttgtgtgttctctacaggaaggaagtagtatactgcttgtgaatggtaggctaaatgagggaaccattaaagggtttttaatagacttttgaaccaaaagacataagggactatacttacattgccttaactgagaaatgttttgcagtgtgagaagacttaatcaaatcttcattacatacctggtcagggaccaggctgaatgtttctttaagcaattggataaaatgcacattgaagacttgttagttatgtgagaatatgtctgacatgcttatcatctctcctgcgggtgcctgagtatcagatacttggtttactgtgttgggttgaatgcttctgttctaatttctaatgaactttaccaccagactacttgatcatgactaagcccaggaacaatgcaaatggaattgccccctgatggggaggaatgggcccagatggcccttaaaaggtgataattaggaaatatagcatatctgagtagctagaaagagagaaacttgttaaagacagtcaatctgtttgaagcaacggtctttcccttaattatatgcattttcatttagagttgctttaaagtaaaatttttcccaggaaaaatttttattagtagtgaaaacctagaaaccacacacattttttgctactctgtttcagattattgaaaattccttccttcatacatttttttttggtttccagatctgtgtaacagactcgctgtgtgtgttttaggggccgttttaggttattttagctcttatgctaaaacagtgggggagcgattaaaagtgagaaaaatattagtatatatttgtaaactgagcttttaaaattaaaatagttgcaggatattacagtctgtgatttcatatactttgtaagattgccttaaatgtattgccttcttggcagcataatgccagatttttctccaatatgtcattaaaataattttacatataacaagttgaactttttaaagacttatattttaatctgaattagcatatttactaattatattacttatttggcttttctttagtccgattctttttttttttttagtgtacaaacttggcattactctttaagaataacaagtgaactggaaatgagagggtggtgacatgaagagagagagaagaaatacattccttatatctcttccagctcctgcatggaatggaggatctgacagtggccgttcctgggtattaaagccagtgcaaaagatagagcgtccaaaaggcaacttcttccttatttgtgaagtcagaaagtaaaatttacattgaagtgctaagctacattattctgaatattttggcagtcatatttgggcagatgagttgctttcctgaaattactcagcaccgtcattcatcctgacaaaagctagtggtacagatgcacctttgggactgaggccaaggtgaaacctgcgttttccaggtctgcccactcagttttggaaggactctcaataaaaccggcctcacaccccaagcatcacccctcctgtccttagtaagtacactctggctggaatctagggtcccagcatctagcccttgggacttcacataaattcatcaagtatcttcctccactcaaaaatctcttacagaatctttgacattttaagcttcattactgcaaagtggatatagttcattctcagcttcaggattccagaagcatacataccaggtcagaatggagaggcatcacgctttccttcagcaagcttcaggggagacaggatttagggtgggctacacatataccagttgtaggatgttttgaactatattcttgcaatcacagacaggttgtcccagagaaaataatctggctctaacttctcttgttatcagtgaaaagcaaaaattacttagtgcaggtatgcttaaaggaagaaaaaggcaagagaaaagtgagaggtaaaaattattaccattttaattccatgattctcagcaatgaaggagcatgattgaaatcccatgtgcccagtcatatctgtaaatgagagtatgatttttgaagactgtattcaattgtttcaacttgagcaattgcaagtaagacttaggactgtgtttaccagttactgttatttactattactttctaaatgtgacctgacttgaaacctttatagatgcaatttttatccatcacagaacaagctctaaagaggagagcagcttcaactttttcaagtattttttttaaaaggatttaactttgaccaacaccaaacttgcatcttgttaaggtaactaataactgactgctataacaatatttagaattttgtttaacagcaactgtcaaaaaaacaagttaaaatagcccaggagatggatggcgattaactctgcgttctttttagactgtgttattaattagctctctagactcaaataggttacatcctctgagcagtaaattgcatgccatttgcaagctctgtggatgaaatttacatgtggcctaaatgctatccacattgttttgttaagtagcattttatctctctggactggtcccttgcctcctcccccagccccagtggaaagttttattcacttttcttgcgggaagggaaagtcgcatgtagtttggtcatttggcgccatcttcttttttattgttaaatccactaaaggcagtcatgcctggcagtaccaggcgggctccttccggggttctggtcggctaagcattcagagttctttgctttttatttactagaaatgttttcagcttctgtctttgctttaagatctgattaaaaggaaccttaaaaaaggaacatagattttggtgtatgtttttcctctctacttctcttccctgtgccccccaaacccaatcaccaacttcccccatccccagcaaacacgggcttttttgtgtatttatttaaaagcattttaggaagcaccgtaataccgcacagcttggaggttaagatagaattggatgtttccctcaccatcagttgatggaatcatcagtgttccggttctatttatcttcatgatttgagaatgtttctgaacagctgcccttccgaggatgctggtatttagacagaccttcctgtcatttatctgactcacaggcacaactcttttgaaagaattaatatcaaacttacatatgaaaatctaccatttagaaatggattctttttcagtacctacttttcaattcaaccggggagatcccatctattttaaaaaatcattaatcacatacttctgacattttccctttcagtttcctcagggggaaaaaagttatttgaataacaaacaaacaaacaaaaacccctcatcgcaaatagctgtcagcctcctatgtgaacaaaagcgctctctcacactgagacctaccgtgttttgtttagttagaggcagcagggtggtagggacactatgcagaaaggcttgggttaatgagcactttctggattgagtgtctctcctgattaacccttggattacttgctttgagttgctaaccctctctcactgcccactcaagaatttcccacatggtagcctcatccatagatgcccttccctagatgcactgatggtagacagcataaaaatgtgtaagcactgtagctttccaatgaactgaaacaaaaagcttaagcattactttttatttccttgatctaaagaacatgttttgggggatattttcttaatcaatatctaagttatctagagttataaatactataaataaattagttacaaactaatttttagacacaagtcttttgttcaaaccaactcttacatagaaactctaaaaatttgggggggaaggggacagttggggatcagaatcactccccattatctctctgttggtgctccccaaaggatcttcagggaacgacgtttaaaaaccattttgtatcatgaaatgggacccgaaagacattctttctagtgactttgtgttagattgagtcatatgaaattgccactgtgtgacccattttgacctaaaaaaaaaaccaaaaaacaaaaaacaaaaaaccagcactagggtaccagagtatttttagtgtaatcactgtacgtgataagaaaatggagaaatgagaaagcttgaaacttagactataagctcctcataagctaatagcgacttcctcccttcttccgcagtcacctggcaagtcccttctatgtgctgctggttctagggatacagagataaaaggcgtagtcactgcctccaaatcatcacagtgcaaaggacaaataaatacagaaggacccatgggatgaagaaacagcccagggtggtgggaacacagagcgagagtttctaggatcttgaaagccatgttgcacggagctcccggtccctgagttttcagactgatctttctgtggactgtgcctaagtaataacagtttcagaacgtagaaactcagtgtacatccttcatagccaggatggatatgatagcctggaagtgaacagtaaatccagtgatttgttttcttcactcattctttcattttaagaaagtgcttagaatccacaagttgtgcttaatgccagcagacgcattacatatgccagccctgccccttagtcacaattactccccacactgacctcccattgcatttaaaaattgtcgctttattgagacatagttcagctctcataaagttcacatttgttttttttgtttttttttttttgtttgtttttttgagacagtcttgctcagtcacccaggctggagtgcagtggcatgatctcggctcactgcaagctccgcctcccgggttcacgccattccccggcctcagcctccctagtagctgagactacaggcacccgccatcacgcccggttaatttttttgaacttttagtagagacggggtttcaccatgttagccaggatggtcttgatctcctgaccttatgatccacccgcctcaccctcccaaagtgctgggattacaggtgtgagctaccgcctccagccataaagttcacatttttaaaggacacacgtcagtggttttcagtctcttcacaaagttgtgtaatgatcatcactatctaattctagaacattttccttaccctaaaagaaaccccatacccattggggttcactccctatgcacccctcttcctttctcctgacaaccactaatctactttctaaatctatagatttgtctgttcgggacatttcctataaatgggactatataaatatgcccttttatctctggcttccttcactctgcataatgttttcaaggtttgtccatgttgtagcatgcattagtacttcattcctttttctggcccagtaatgttcaattgtaggaatataccccattatccattccaatgatggatattttttgggggatatccactttatggccattataatttcactatgaacatttgtgtacaagtttttggttggacatacgttttcatttttgttgggtatatagctaggagtggaattgctgggtcttatggtaactatgtttaacattttgaggaactgggatgtatagcgttttgtgcctgtgttatgaaactaattatgaagcatcttatattcattatcattagatctgtctcctccattaggttttaagtttcttgagacagggattatccttcttcatctttgtatcccccacagtccagcactcaccaaggcacaaagtaggttcttaggaaactggtcagaataaaactgaccaatgcaacatcctccttcccttaaaatcaccagcatacctgggaacacaggctttctctttctctcttccctgtagcaagtgacagcttatcaggaatggaggcagctcggtattatccatcaagccttccagctgggtgcacaccctccttatctgctgtgggaccttcaccagcatcctgggatttcctcaggctgcctcatccccacaacggcagtgatgtgacccactctggtttatgcagatacgttaagagagattattttaagtaccactgaaacccaagcagaggcaaggctggtggaaaccccagtatttgggggcacactccctgtttgacatggttcaggaatgactcatacatctactttaagggggatttggacaaggaggcactaagatacctatccaggctttgacttgggagcattgtgcaggaggtttaagaaagattattttaagactatctcagaaggctggagcagcatctttctgatttcttctgctacctttcactcggagcctgtgatttctaacatgtatttcaggttggatttaagagagagctggcccctactgaattggccacctttgatgttacagtactgaggaggggagggacagatggaacaaaagtcgtaattgcccaaatttacaataggttcccagcagcagctcgcacaaaagaaatgttaatgcaataaactgtaaatggaaggaagctaagcaggatttatggctggcgcaaacctccatcaaggcactggaacctctttccttcatctgtgaggcatttcagtggtcacagtagaattgggctcatttgaaaatcagtggctgctctgtgtcttccctcccttgtgtgtcctgcaccccctacacaaaccaattcctgtaaaaacctggggaatctgatagaacaattggagaaaaacatcagtcattgagggtcaagactgcaaacccggcagagccaagagtgcacacacatttgctgtgcacatgtatgtgttacagctgcaaccaaagcgtgcgttttccttccccaagtctgtgttggggacttccgcagacacagcagatggccagagtgtttccacgtttcagcctcgaagtgagagggcagcatgtcattcaccagcctggcacttacccatccatcagggccacctctataaatggctgtttttcacatttggttccagcaggttccatctccattccggctcacacatacctttacctgtgttgtatcatgtggggtgctccttgtctccttgtccagattgctggcccgcttgcttcattaattaaccgaggagcacgtctaaatggaaaattgctttctgagatctgtgtgtcctggctccatgctgtgaggggctccctgtaattaaacacgttttaagagttgctgtcttgcgcatgtgccctggacatcggtgctttccccactggctgggtagttctgtttcagaccttagacctaaatgataataacagttacaaggaaacttgcatatcagttgattaagtgtggggaatttttttccttttgaaagttgggggaaagaactcctcagtggggaagtgatttttctgccctgtagggatgggaaaatggttaatcatcatgggggcctcaacagacctcagcatgttcgcgaagtccttggcctcaggttcctcatccatcccaccgcgagagcgatacggcttgggtaagccgcgaatcccctcactgggctccaattattccagaattctaactttaaaaataaaatattcatatttaaaagttcctgctaccgtttcaaagaagcttcccaagaagctcttcagagctggggcatggaggaacctgtcactgggtccctttctgctgggggatcagttccttttataagtaggaaaagatttctccataccccttgcaaagttcatggctgacacccctataacaaaagacaggttaacaagagcaaagcacacaaatatatttaatacaagttttatgtgacacaggaggcttctgaaatgaagcctcaaagacccagggaaaaccgcgtttttatggacagtcaagcagaaatatgatgagagaacaaaagggtttgatgtagcgtaataaacttagcaagcccgttcagattcttcttggtgttcctgtgtgacattttttttttcctttttgttttgagacggagtctccctctgtcgcccaggctggagtgcagtggcgtgatcttggctcactgcaacctccgcctcccgagttcaagagattctcctgcctcagcctcccaagtagctgggattgcaggtacgcaccaccacacctggctaatttttgtatttttagtagagagagatttcaccatgttggccaggctggtctcgaactcctgaccttagatgatcccctgccttggcctcccaaagtgctgggattacaggaatgagccaccgtccccagtgtgacatttcttttctctgggtacagggcaggacacctgtcacatgagggtcttcaggggaggagggagaaggtcagagggtgaccttcctacttctgcagttttctcgatttctttcagtttacagtactcagtaggacaaggtgcatatttggggatatcgtgttctgagccccaacagtaacaaagaacaaagaaagcctttaggcagtttttgctgagactctcaaataggaatttagagtgatggtccttgagtcagagaggccactagagaaagtttgactttccatgtagaatagcaagctctcctctggcaagtcttttccagacaaggctctataattttttgctaataaatgtgtggacaaagttatgggatgtatagaagtctgacaccaaaaccatgtcagagactttttttttttttttaaaccgagtcttactctgttgcctaggctggagtgcagtggcatggtcatggctcactgcagcctcaaccttctaggcccaagagttcctcccacctcagcctcctgaatagctgggaccataggtatatgccaccacacccagctaatttttagtttttttatagagacagggtctccctgtgttgcccaggctggtctcaaactcctgggctccagcaatccttccaaagtgcagggttatagacataagccactgcacgtgtcctgtaacaaagattgttagtaaaagttattgaaatttaaatctatgattcaagtcctgatacataagacacatggcacatggtaaaaattgatttgattacatcctaggaggcctagacttgggaaagaaggaaaaaaaaaagtatgaggctgggcatggtagcttgtgcctataatctcagcactttgggaggctaaggcagggggattgcttgaggccaggagttcaagaccagcctgggcaacatagcaagaccccatctctaccaaaacaaaacaaaacaaaacaaccacaaaaaaaacccacacaaattaaatttaaaaagaaaaagatgaaaagaaagatgagaagataaggaaatatctgtagacagtttaagtctctatttttttctacaaatgtacagttatgtattgtaacatactgcatcttttgaccctgtcttctctgtttcaacagagcttatctttttctatgtatttctgctgctactgcttttccaaaccacagccattgtcctgtaatgcccttatgcatttggccaagccctcttagcttctttattattgtggggtcttagttgatatttggggtgtatgacattacaaaacacatgggatgtagatgtggattgggagagcccctgaattgtagcactctgctttcctcatctgtaaaatgggtataatcaaagtcttggaagggtaattgtaaaggggtgtgcagacagtggggttactgttatttgcaaggatccgcccatagttttatctgcaaatgtcactagcttttgatttactcactctcgcttgcgtcttctttcgtgctgatgttggctctgctttatcccacaggctttttattattattattacttttgagacaaggtcgctgtctgtcacccaggctggagtgcagtggtgcaatcttggctcactgcaacctctgcctcccaggttcaagtgattctccccactcagtagctgggattacaggcacgtgccaccacacccagctaatttttgtatttttttggtagagatggggtttcaccatgttggccaggctgagtgatcctcccgccttggcttcccaaagtgctgggattacaggcatgagcccctgcacccagcctttctttctttctttttttttttttttgagacagggtctcactgtgttgtgcagtggctcgatcttggctcactgcaacctccgcctcctgggttcaagcagatctcatgtctcagcctctcgagcagctgggagtacaggcacccgccaccacacccagctaatttttatattttttggtagagatggggtttcaccatgttggccaggctggtctcgaactcctgacctcaagtgattcatttgtctcagtctcccaaagtgctgggatttcaggcgtgagccaccccaccgggcctcccaacaggcttttaaagcaccagggcagcagggcactgggccaacaggtatatttgggaatgtgcatttggtttcatgtgtaataggaaagagattaattaaggttgttagtgtggcctaatactaaatttcaggaagcctcacaggacacatgaaacaaatctttacaacacatatgtgttttcatgctgctgaacattttgaagacgttttgccatgctggagtttgtttgttttgtttgtgtttttgtttgaggtgccgtcttattctgtctctcaggctggagtgcagagttcagtggcacaatcttggctcactgcaacctccacctcccaggttcaagctattcttctgcctcagcctcccgagtagtgcctggctgctgttttttttttttaattgttaaattagatgggctcagtattaccgtgccttgatggagtttctagttgagggatcagtgtcatttctgggtccccatcagaattacgttcaagctataagtagttatgcaaagtcgtaggttaaatgatttgggaataaaatgtcatttgacgtgacagaaatgaacccttggaggcccacatttccactgggacttgctctcagttccagttctcatgttaagtaattttattaactgaggcaaggaggggcatgcggtgacaagggaaatattttttgctaacattttaatcctaatcacaaaatttattgtgtgtggctttatatgcatttgtagctataaagccctggaagatgatgaaagtaaaaattagaatgtgtggtttttctgcccaggtgttatttaaagcattgtatgaattgtcaaaaagattaattgttgttgcttgcagctaaacagatgataaattttaaaattatattattactgtgtgtcagcataaaagctctgtgtcccaagtgtgtcacctttttctgttgctgttgacaaggttcacattttatagcacaccgccagaaggtgttgacatatattcagattactgattaaatgtttttaaaacgtgccactcagaaactaacactgatgttctatgaaagagtcatttttcggagtaagattttttttttcccttcatcattaacatggaggaaatgttaaacactgacattttaaaaaatgaacctgggactggcgcagtggctcatgcctgtaatcccagcaccttaggaggccgaggtgagcggatcacctgaggtcgggagttcgagaccagcctgaccaacatggagaaaccccgtctctattaaaaatacaaaattagctgggtgtggtggtgggcacctgtaatcccagctactcgagaggctgaggcaggagactccctcgaacccgggaggtggaggttgtggtaagctgagatcgtgccattgcactccagcctgggcaataagagcgaaactccggtctctaaataaataaataaataaaaacgtggctgggcgtggtggctcacgcctgtaatctcagcactttgggaggctgaggcaggcagatcacgaggtcaggagttcgagaccaacctggccaatatggcgaaaccccatctttacgaaaaataccaaaaattaggtgggcatggtggcacgcgcctgtaatcccagctactcagaaggctgaggcaggaaaattgcttgaacccgggaggcggaggttgcagtgagccgagatcgcgccaccgtactccagcctgggtgacagaccaagactccgtctcaaaaaaaaaaataaaaataggccaggcgcagtggctcacgcctgtaatcccagcactttgggaggccaaggtgggcagatcacaaggtcaggagttcgagaccatcctggctaacaaggtgaaaccccgtctctactaaaaatacaaaaaaattagctgggcgtggtggcgggtgcctgtagtcccagctactcgaggctgaggcaggagaatggcgtgaaccacggaggcggagcttgcagtgagccgagattgcaccactgcactccagcctgggcgacagagcgagactccatctaaaaaagtaaaataaaataaaatgaaaataataaataaataaataaacctaatgttactgcactttcccatttcaaattgcagccagcaatgaaaacaggcattagcattcccatttcttctcttctccttcactggaagggcaacaacaaacacacccacggtgtaaaaacagcaccaaggccgggtgcagtggctcacacctgtaatctcagcactttgggaggccgaggcatgcggatcacctgaggtcgggagttcgagactagcctgaccaacatggagaaaccccatctctacttaaaattaggcgagcatggtggcgcgcgcctatgatcccagctactcaggaggctgaggcaggagaatcacttgaacctggaggcggaggttgcggtgagcggagatcgcaccattgcactccagcctgggcaacaagagaaaaactccatctcaaaacaaaacaaaacaaaacaacagcaccaaggaaggcgctaaatggctacttgtaaacaacccaggttggacactggacccacgacaaggaggcaagttccgtcctgtggtggtgtttgtgatgggaagtctggggctttgactccctcaagtttccaggctaacacacacaactcttcccagcagctgaggggccccgaagccttgatgtccctttcacgttgaaggacctcactggtcttggctgtttgcgttttgtggatggagtgggccagtcttcagagaactcaaatgtgtatttgctgcagggagtgataagtaaacataatgcctcaagaatcaacatttgaatgcttttctttttggcgttaaggtataatgggacactggcaatatatgctgtctctctgaacacagcatgaaagaacttgaaaacaaatgatttagtattcattacggaaaagttggatttttttccctctctgattgtcaagatttcttcgtcgatgtcagttttccagtgtgaatttttcctctccactcagaggaagttgacgttggttcagtgatgttacagaggatgctgtaagacagccaggagcccaggccggttgtcacttcatcccagcatggtgcaaagttagagatgttgcagtgacagccttgggtgccctcaggggcaaccaagtctctaaataatctctgtgaccaaaagtacataggaggttgtaaatatcccacaacaaaaataaagatagctgccatttcccagaacttaatgcatatcaggaaatgttacctctttatatatattgtctcatttaaatccagtaagatagcagcagctgtgggaggatgtggtttttgtttttgtttttgttttgagacagagtcttgctctgtcacccaggctggagtgcagtggcgggatctcggctcactgcaagctccgcctcccgggttcacactgttctcctgcctcagcctcccaaagtagctgggactacaggcgcctgccaccacgcctggctaatttttttgtatttttaatagagacggggtttcacatgttagccaggatggtctcgatctcctgacctcgtgatctgcctgcctcggcctcccaaagtgctgggattacaggcgtgagccaccgcgcccggcctgaggatgtggttttattcccatttaacaaaggcttgagtatcacttcttatttatttatttattttattattattatttttgagacgaagtctcactctgtcacccactctggagagcaggggtgtgatctcagctcactgcaacctctgcctcccaagttctagtgattctcctgcctcagcttcccgaatagctgggagtacaggtgtgcaccaccttgcacggctaatttttgtattagtagagatggggattcaccatgttggccaggctggtctcaaactcctgacctcaggtgatctgcccatcttggcctcccaaagtgctgaggttacatactttattaacaaaggagtgaagtgataccccctctcccctgtaagtagcagccaacattcaaacccaggtgtgtcagattttagagccacactgacattcagcagctactgactgattgtctactatgtgttaggcattgttttcatcacaccttttattttttgttttgttttttagggacagagttttgctttgtggcccaggtgtagtgcagtggcatgatgtttgctcactgcagcctcgagctcctggcctcaagtgatcctcctgttttggcctcccaaaatgctaaggtgctgggatcacaggtatgcgccactccgctcagcccacatatttttaagtctgctttttaacctaatttacttattttgggggtcttaaaaaattggctcacagccgggcgcggtggctcatgcctgtaatcccagcactttgggaggccaaggcgggtggatcacgtgaggccaggagttcaagaccagcctgatcaacatggtgaaaccctgtctctactaaaaaatacaaaaattagccgggcgtggtgtcgcatgcctgtaatccgagctacttaggaggctgaggcaggagagtcgcttgaacctgggaggcggaggttgcagtgagctgagatcacaccatggcactccagcctgggcaacaagagtgaaattccgtctcaaaaaaaaaaaaaaaaaacctatttaaaaatgaaggctcatgcagaatgctctgcaagttcaaaataaaacagagctctgagcgcctagaggctttttgccttaaggggcgaggaggaaaaagattaagatgctccttggaaaatagccctttttggctccatctcctttactgtggtcacctgcacatgcctttagttcttctggatttatatctaagcacgttgctctgctacataagaagctgacaacatcagttaccttcctggaggtgaaggagagacaaaggggctgagtgggtgagaggaatactttccaccatgaactctttggtacctttcggaaccacgtgaatacagtatcttttcaaaagaaaagggtgctatattcattgtcctagactattaagcactttaaaaggcacttcaggtaatctagttgaagtgcaaatttcactgaacccagactattatgcaaacaggactagctctgtatttattcttttatgttgtggcttgccatccaatttgtgtttccggggctgggcacgaggtggctctagcctgtaatccccgcagtttgggaggccaaagcaggcgatcagttggggccaccatctccattgtccctttttaaatttaagtgaccatagcttcttagtatgatatcaggtttttgttttcttcccaccttgtctttgttttttagtgtgtggatgcctttgaaattagtttttttgtttgcttggtttttttttgagatggagtctcactctgtcgccaggctggagtgcagtggcgcgatctcggctcactgcaacctctgcctgccaggttcaagcgattctcctgcctcagcctcccaagtagctgggactataggcacatgccaccatgcccagctaattttttgtatttttagtagagacggtatttcaccgtgttagccagagtagtccgatctcctgacctcgtgatccgcccaccttggcctcccatagcactgggattacacatatgagccactgtgcctggccaaaattagttcattttttatacatgtcctttacacaggagatgtattcagaaagattatctatattttttcctttaaacaatgcatttgtttgtttgttttatttgtaagctcatctcctgggtttagagcagaatgaaaaatttgaccttaatcttctcttatccactggttggaagctcctacttttatgtcaacagacataaaaaagcttatacatataagataatgtatagcatgcataaagatttatagaatgctatgtctcataaatttcacagttataaaacaaaacctaagcttatgcatgtggagatattcctgtgtttgcagttgtcagtgacttctagagaatgtggtaaaggaaaaaagcacctgtggaagttatttatgtaaaagttgcttatgtaaagactcaagccattaacaagagaaggagacttctttatattgttaatgacattcagatctttcttctgaatgagggttgtcactctgaatgagtgttgtcattcatttcctccaagccttcagatatctttttcctttatctgacacatttcaggaaagagtaagggaaagatttatttatattactttgatggtttcattttctttgtggaagtccagtgacccagatatagagatcttcttggaatatattactttgatggttactttctctttttggaagtccagtgacccagttatacggatgtcctcagaacatttgaagtctagttctgcattataaaatagcccagttgccataggttgatttcctgtaaacctaaatcatgattgcaaactaatttggatgctaattaggactcatataatgattatatcaatttataacttgtctaacaacaatgcatttctttctttgctaggttaagtatttacactatgacctgtgaacagggaaaccggcctgtgttgagtactttctatgagccaggtgctcgactgtgtacaaacttagaagaaccaggtgcacacgccaggtttgggggccgtttgacagtcagcattcaataaatgtgttgtttaagttgatataattaatttaaaaggaagtagcaggtgatggtagtacacttcattgtcctagaatattaaatactttgttgtcagcagacggacttctttcatatgcacaggtcatcttgagcacggatcctaagcctagtctttaatccttcctagcatcctacatgagccaaacttagacaaaaaacaaggcaactcttggttatctagggcaatttgaaatctcagctacctccactgtgtccagctcaccgcagttatgcatctatttacaacattatgtttgcaacattatgtttaagcaaaccacaatgaaagcattaaacatagaataactatgatccagcaattttacttccaagcatataccgaaaagtgttcaaagcagggactcagatactgtgttcctgggtacatgggtacacccatgtttatagcagcattattcttgatagccaaaagatggaagcaacccaggtgtccatcgacaggtgaatgggtaactacaatgtggtgtacacatgcacacacacacacacacgcaagaatattattcaaccttaagaaagaatgaaattctaccagtcacggtggctcacatctgtaatcccagcactttgggaggctacggtgggcggatcacctgaggtcaggagtttaagaccatcctgaccaacatggtgaaaccctgtctctactaaaagtatgaaattagccaggtgtggtggcacatgcctgtcatcccagctacttgggaggctgaggcaggagaatcgcttggacctggaaggtggaggttgcagtgagccaagattgtgcctttgtactccatcctggagagcaaaattccatctcaaaaaaaaaaagcatgaaattctgatacctgctataacacagatgaaccttgaagatatgctgagtgaaataagccatatgcaaaaggacaaatatgtgattgtacttatatgaggtacctagagtagtcaaattcacagcacagaaatgcgaatggtggttacccggggctggggggaaggagggaatggggaattggtgttagtgggcttacagtttcagtagggggtgatggaaaagttctagagatacatagtggtaatggatgcacaatattgtgaaaggacaaaactatacctaaaaatggttcaaatgctaaattgtatgttatgtatattttgccccaatttttttttttgtttttttttgttttaaagacagagttttcctcttgctgcccaggctggagtgcaatggcatgatctcggctcactgcaacctccgcctcctgggctcaagcaattctcctgcctcagccttccaagtagctgggattacaggctcgtgccgtcatgccccgccaatttttgtatttttagtagagacagggtttcaccatcttggccaggctggttttgaactcctaacctcgtgatccacccactttggcctcccaaagtgctggcattacaggcgtgagctaccgtgcctgacgtattttgccccaatttttaaaagcaacataataaagacaaagccactgggaaggatataaaatgcccctgagccaaacactgtatagccaaaagagcaaaactacaaaaactgcaccaagcttctttgtaaattcattcttccaccctccaggacactcttgcctggtttgcatcctgagagtctcctggggttccagttatttcaaggtcacagtcaggtaggcacggtggctgtgctatggtggaaatggcttttggattcctcgtaattttggattatcggtgccctgtttttctgagaccaaaacttatcaatagagtattacggaaggtgatatgtagtaagtgcacctttcttgggcattcagtctaaattcaatagtaaagggaaaatcacatatagtcaagtccaaattgctcatgatgttacagtagatctacatgtccctaacttgattacctattttccctccagcactggagtgcatctctgcttcttcagccgagctccagaaggagaagatggctgcatttagagtcagactggaggaaaaggagcattttgatattttattttatttttatttattttttagagacaggttcttgtgttgtcatccagactggaatgtagtggttgcagctcactgcagccttgacctcctgggctgaagccatcctcaagcctcagcctcctgagtagccaggactacaggtgccgtgccaccaagcccagcgaatttttgtatttttttgtagagacggatcctgctgtgttgtccaggcttgaaatttgattttaaacatattaggcatcacactaagcccccaagacaagatagaagcttacagaaccttgactatctggaatgactttcacagagtgatttcatctttcttcttaccctcaatgagtaacgtgaaggctgagcaggtcatactgttcaaattatttatcttctttagacttttttcttccaaacaccagtagttgaatttgagtactttaagtgctagtattatgcaatttcattttattttattttattttatttttgagacagagtcttactctgttgcccagactggagtgtagtggtgcgatctcggctcactgcaacctccgcctcccgggttcaagcaattctcctgcctcagcctcccaggtagctgtgtttacagtcatgcgccaccacgcccggctaatttttttgtgtgtctttagtagagacgggatttcaccgtgttggccaggctgatctcgaactcctgacctcgtgatctgcccccctcggcctcccaaagtgctgggattacaggcttgagccattgcacccagcctggattaatgatttcgaatgaacatttacaatgatatgttttataataaaacacattaaaaagtttgaaacactagttactagaaacagttctctctgtaatgacagttagtcatgttgttgctgcagtgacagttgacttggtgtgagggtattgataaagcctggtgatttgtacacttgcccatattatgcttttcccaggctagctatgcaaatctcatttcccttacatttgaaagtcatttcagaattgtttcattagggttgaggcaagcacaaatcatgaatgcctgtgtcttctaccaccaaacagattctgttggacccacaactgatatgctttcagccaggttccatttagcattcaccctggacttagggactctacaagagtgctgggtatttagttttgttttgttttgctttttgagacagagtcttgctctgtcacccaggctggattgaagtggcgcaatctcagctcactgcaacttccaccccctgggttcattctcctgcctcagcctcccaagtagcagggattacaggtgcccactaccacacccggctaatttttttgtatttttggtaaagactgggtttcaccatgttggccaggctggtcttgaactcctgacctcaggtgatccacccgccttggcctcccaaagtgctaggattacaggcgtgagccctcacacccggcctgatgctgggtgttttgtacagtggtcccaccttactgtgtagaaattctcagtcatccacctaatttgtttatttcccattcatatacttcatttattcactcactcacttggccatttatgcatatttattgattttgttaaaaagatacctgaatgagtggaacactgagatgatatagtggaatggacggatagtggttagccccttggacccatgagggccaggttctgaaattccagctctgaaattctaccagctggttgaccttgggcaaattacttagcttctctgtgcctcatttcttcatttataaaatggagataataggttaagagggttagatgagacattcattcatagtacttggcacacagtaagagcccagtaaatactagctgttgttatggattgaattgtgttgcctccccacaaactcatatgttgaagtcctaaccacaggtactcagaatgtgattgtatttggaaacatggccattgtagatgtaattatttaagaagagtgattaggctgggcatggtggctcacacctgtaatcccaacaactttgggagcctgaggtgggcggatgatgagggcaggagttcgagatcagcctggccaatatggtgaaaccctgtctctactaaaaatacaaaaattagccgggcgtggtggcaggcacctgtagtcccagctactcgggaggctgaggcaggagaactgcttgaaccaggggggcggaggttccagtgaaccgagataacgccactgcactccagcctgggcggcagagcgagactctgtctaaaaaaaaagaaagaaaaaaaaggagtgattaggttgggcactaatccaatatgattgctgtccttaaaaaaagagaaaatttgggcacagagatagacatgcatagagggacaatggccatccacaagccaaggagagggtcctggaacaaatcctttcttaccagtcctcagaaggagccagccctgctgacacctcagtttcagacttccagcctccacagctgtgagacaataaatgtctgtcagtgaagccactcagtctgtggttctctgtcacagcagccctggccgaagacacagctggcagcaccgtcctccgctactgtgtttctcattgacccgagaacctgcctttgtccatgtcctggccaatgggagatacattttctccttctcagcttgtattcctgtccttttctttctttttttacaaaatagcatacaaaaaagttcctagcaagaagaggtgctccagaagttccctggctgtttcattcctgtgtctcttcctaaaaagctgcagttgaaaagatagaatttgttttctcttagcacattcttctcactttctaagcttgatttttctttctttgaaagagtgtaaccccttcaaaattaactcctagagattgctcacctccctcccaaactttcgatgaggagcgtttattttgtagactcttatgtgtgaattctttcaataaataggggatgcagagaagcagctttgtggagtgaagcagtaggaaagagcctgttggggagagagcttcgccactgcatttcagtagctggtttcgcccctaccttttttttttttctttctttcttttttttttttttttttgagacggagtctcgctctgtcgcccagtctggagtgcagtggcgctatctgggctcactgcaagctccgcctcccaggttcacgccattctcctgcctcagcctctccgagtagctggggctacaggcgcccgccaccaagcccggctaattttttgtattttcagtagagatggggtttcaccgtggtctcgatctgctgacctcgtgatctgcccgcctcggcctcccaaagtgctgggattacaagcgtgagccaccgtgcccggcccacccttacctatttttaaatggtgacttgtgtttttatttgtttgtttttaaagacacttgaaattggacagtgtttctccatcctctccagaggcccagagcaatgtcgcaaggatgcattctggacgaggcagtcacggggccgcacatggcatttgttcttctcagggaccgtctgctgtgtttctctgccccagtggagctgggggaataataaagctcttattatttatactgcacagcatttttttcagtggtccttgtcattgagacttatgaagacaatgtaggacaagagggaacttgtgagtttttatgcaggtagggaagaaaagtaaaaggggctatatttccagggatattgctttttcccaaacccctgcacttccccagtccttttctttatcttcctttcccaaatgagaggtgtccttcttctccggtatcagccccctagtttcttccctgtcctcggggaatcttggtacaccatttagcccctgtcttggtttttgactctgtccctttgtggaattcttacccatagcttacagtgatgtttcacatacatctctgccaaagatgaagtggaaaataacctttgctttgtaagcacatctccttcaagctatcgacaagtctcctggcttctcttagtttctaacccctttttttttttttttttttttttgagacagagttttgctgttgttgcccaggatggagtgcagtggcgtgatctcggctcactgcaacctccgtctcctaggttcaagtgattatcatgcctcagcctcctgagtagctgggattacaggcgtctgccaccacacccagctgatttttgtacttttagtagagaggggttttgccaggctagtcttgagctcctggcctcaagtgatctgactgccttggcctcccaaagtgccaggattacaggtgtgagccactgctcacagttatctatttgtcttagtccatttaggctgctataacaaaataccataaactgggtgtcttataagcaacagaaatttatttcccacacttctggagacttggaggtccaagatcaggcagtggcaggttcagtgtctggtgctaaggaagcacctgcgcctcccggtccacagacgcacaccttctcactgcgtcctcatatgacagaaggggtgagggagtccgtctttttttttttttttttttttttgagacggagtttcgctctcgttgcccaggctagagtgcaatggcgcaatctcggcacgcaacctccacttcccgggttcaagcgattctcctgcctcagcctcccaagtagctgggattacaggcatgcaccaccacgcccggctaattttgtatttttagtagagatggcgtttctccatgttggtcaggctggtcttgaactcccgacctcaggtgatctgcccacctcagcctcccaaagtgctgggattacaggcgtgagccaccgcacgcagctttttttattttttattttttaatatttttgagacagagtcttgctgtgtcaccaggctggagtccagtggtgccatcttggctcacggcaaccttcacctcctgggttcaagcgattctcctgcctcagcctccagagtagctgggattacaggcgcccaccatcacgcccggctaattttttgtatttttagtagagacaggatttcaccatcttggccaggctggtctagaactcctgacctcgtgatccacccgccttggcctcccaaagtgctgggattacaggcgtgagggagtctgtcttttataaaggtgctgatttcatttatgagagctcagtcctcgtgactaatcaccaaccaaaggcctcacctccacatttgatcacactgggaatgaagacttcaacatactttgcaggggacagaaacattctgtctatagtaccattaactttctgctatggaagttgaagacagttctcttttgtcgtattatacccctgatacacacttcagtgtttatactgtgccaaggaaagcagtgttcacagctgagccatacggtacactacaattttcctttctcatataactttttgtccccttggagttagcaattgactttttttttttttttttttttgagacagggtctcgctctatagcgcaggctagaatgcagtggcgtgatctcggttcactgtgacctctgcctcctgggctcaagcgatcctcccgcctcagcctcccaagtagctgggaatacaggtgcgtgccaccatacccagctaatttttgtttttttgagttttttttttggtagagacagagttttgccacattgcccaggttggtctccaagtctggagctcaagaatctccctgccttggcctccaaaagtgctgggattacaagtgtgagctaccacacctggccagtgattgactcttttgctaaaactaattttttcttccaactctttgacaaagtcgtcaatattaagcaatatacccttactacttttgattttgtttttaaaggaattccttctggagtcttctatcctgaacttgtcgctttctaggccagctgcatttctgtgtttctaaaacttccattgtttataaaacaccataatcctggcgtttgctctgtttgtactctgtatttccagtatctggaaaccatgtcttctttcttggcttatttcctcattcagggctgtgtgtcttctagtagttatgtgaaaagagggttcgtgaaagttaaatgtttttgaggctatatgtctgaagaggtctttggtgttcttcagacttcatggaaaacattttccctaagaatgttaaaggcattgctcccttttttgcttctaatgctgccattgctttaaaatggtgccattttgattcttgatcctttttctgtaaatttttttctctcttgaaaatctctttcttgaagatctctcttgaagatctctttctccctagtcctctcaaactttgcattgatgtactttgatgggatcatttttgttaattatgtaggtgttccataggcctttcagtctgaaaatttatgtgttttagttctaggagctttctttgtatttctctatttctttttttttttttttttttttttaagacagagtcttggtctgtcgcccaggctggagtgcagtggtgtgatcttggctcactgcaacctccgcctcccaggtccaggtgattctcctgcctcagcctcctgagtagctgggattacaggcatctgccaccatgcctggctaatttttgtatttctagtagagacggggtttcaccatgttagctgggctgatcttgaactcctggcctcaggtgatccgccctccttggccttccaaagtgctgggattacaggcatgagccaccatgtctggcctcaaatttttatttttgatagctttttcatgttctctaatgtttctgattgattgattgattgagaaagggtcttgctctgttgcccaggctggagtgcagtggtgcaatcatggctcattgcagcctcaacctcctgggctcaaatgatcctcctgcctcagcctcccaagtagctgggactacaggcacaagacagtatacctggctaatttttaaatatatttttttgtagagacagggtttcgctatgtgcccaggttggtctcaaactcctgggctcaagcaatttgctttcagcttcctaaaatgctaggattacaggtgtgagtacatggcacctggccgtgtttgtttgtttgtttttgagacagggtcttgctctgtcacccaggctggagtgcagtggtacaatctcggctcattgcagccttgacctcctgggctcaagcaatcctctacctcagcctaccatgtttcttttataaatgatattttattcctgtttttgcatgtattataatatcttatttctctgtttgttctgttttttgctctgttctgctctttgcattgtccgtttctcttgagtgctcttcctggttgtttgtttcggtttttatctttcaagttgataacttttgtcgaaggtctggtggtgtttgactgtcagtccatatttaaaaatgaggaactggcctggtgtggtggctcacgcctgtaatcccagcactttgggaggccgaggtgggcggatcacctgaggtcagctgtttgagaccagcctggccaacatggtgaaaccccatctctactaaaaatacaaaaattagcttggtgtggtggcacacgcctgtaatcccagctactcaggaggctgaggcaggagaactgcttgaaccggggaggtagaggttgcagtgagtggagactgcgccactgcacttcctcctgggtgacagagtgagactccgtctcaaaaataaataaataaataaataataaaaataaaaatgaggaacttaaggaccaggagcagtggctcctgcctctaatcccagcactttgggaggccgaggtgggcggatcacttgaggtcaggagttcgagaccagcctggccaaaatggtgaaaccgcgtctctactaaaaacacaaaaaattagccaggcatggtggcgggtgcctgtaatctcagctacttgggaggctgaggcacaagaatcacttgagcccaggaggcagaggttgcagtgagccgagatcataccactatactctagcctgggcaacagagcgagactctgtctctaaataaataaataaataaataaaaaggaggaacgtaaccatcaatagagagttatttgtgtatggaactgatgggcctcactgtaaggttatcagctgggggcccaccagcttcaccagaggatcaccacatatcagtgtctgtaggcttgttctcctgggctcttctgtttttcagagaggtatcctgtgctctccagcttcgggggattagacctggcttccagcattctagaagccaaggctaggaggcaactggggaattctcattattccatacctggactttcactcagcccgtttcagcttttgactaactcctccccttcactgtgttttgcctccacaaagtgaaagctttttggggttccatttctccagggatttacttcctttgcccttttggaatgggacaggttaaggtctaagtgctctttatagagattttctttttttctttttcttttcttttttttttttttgagacagtctcactcggactggagtgcagtggtgtgatctcaactcactgcagcctggacctctagggctcaggtgatcctcctgccttagcctcccaagtagctgggactacaggtgcatgccaccatgcctgggtaattttttgtattttttatagagctcaaggaatccacccgccttggcctcccaaagtgctgggattacaggtatgaatcactacacccggcctgtacggattttcaaacaatccttttgttccaacccactaccctgccttcagagataccaggaacctctagttcctaagctgttccagagtcctgtggtagaaataagcttgatgcttttggcttgtcatgtttctcaggtcccggggctgcaggaagttagtagtcagtgttttcacttgttgattcactctccatttgccagtggtttgttaacatctcttataagggattgattcttctgttatatctgtttctgtggatttatactcctcccctcttcattgtgggttttagaaagaaagcggagacaaatactaataataatctgccatgttatttagcaaactttttaaacatttttaaattatgaatgagtattgaattttatcaaatgctttttctccatctcttgagatgttcaaaaggcttttcttttctcatctgttaatgaagtgaacaataataaagtgttttgtaatgttaaattgtccttgctttattggtgtaattttttttttttttttttttttttttttttttttttttagagacaaggtctcgctatgttgctcaggctgggctcaagtgattctcctgcctcagcctcccgaatagctgaaatactggtgtgcgccaccatgcccggcagacgtcatttttcagtttgctgaaattctgaattttatagaaatgtaaaattgagactggcctatatttttctttcttttcttttcttttttttttttttaatagagtctgtcgcccagactggagtgcaatggcgcaatctcggctcactgcaacctccgcctcccgggtccaaatgattctcctgcctaagcctcccaagtagctgggataacaggcatctgccaccatgcctgggtaatttttatatttttaatagagacagggtttcaccatgttggtcaggctggtctcaaactcctgacctcaggtgatccacccacctcggcctcccaaagtgctgggattacaggcgtgagccaccacgcccagcctatacttgtttttgcctccttcagtttttatgcttttttcagaaatgaattgggaaaaaattatgtgggaaactttccctcttactttaatttcttttcttttctttttttttttttttttttttgagacggagtttagctcttgttgcccaggctggagtgcaatggcacgatcttggctcaccgcaacctctgcctcccaggttcaagcgattctcctgcctcagcctcccaagtagctgggattacaggcatgtgccaccacgtccagctaattttgtatttttagtagagacggggtttctccatgttggtcaggctggtctcaaactcctgacctcaggtaatccgcccaccttggcctcgcaaagagctgggattacaggcgtgagccaccacgcccagcccccctctttaatttcttgaaccgcttgtataagatatgaattatctgtttcttgggctggcatggtggcttacgcctgtaatcccagcactttgggaggctgaagcaggtggatcacctgaggttaggagttcaaaaccagcctggacaacatggtgaaaccccgtctctactaaaaattcaaaaattagctgggtgtggtggtgcacacatgcaattccagctactcgggaggctgaggcaggagaattgctagaacccaggaggcagaagttgcagtgagctgagatcatgccgttgcactccagcctgggcgacagagtgagactctatctcaaaaaaattagaaaaaaaaaaaaaaaaaaaaagaattattttttatttttttgaggcagggtctcggtctgttgcctaggctggagtgcagtggcacgatctcagttcactgcatcctctgcctcccaggctccccggatcctcctgcctcagcctcctgtgtaactgggactacaggtacacgccaccatgcctggctaatttttgtattttttgtagtgatggggttttgccatattgcccaggctggtctcagactcctgggctcaagtgatcctcccacctcagcctcccaaaatgctgggattccatgggtgagccactgtgaattcactgccttgagtaatctgtttcttaaaggcttttgttaaaacttgttagaaattatctgtacaacttgggtgtgtatgtgtgtgtgtgtgtatctgtcttgactactaatgcagcatatttaataacataggatcacttcagatttcctagctttcatttattgaattacagtacttttgattacttatatttatctggaatatagttcacattctctgtttttaagtttattgccataaagttgtttttagcattctcttactgttttttgtttgtttgcttttgtttttgtttttgttttgtagagacagggtctccctaagttgcccaggctggtctataactcctgggctcaagtgatcctcctgcctgggcctcccaaagtactgaaactataggcattagctacctctcccagcctcagaagcttttctacacccttcctaggggaatggggagataagtaggggtcacttagggagtaaatgattatgaaaaggggcatgggcttttgcaaaaataggcagtagcctgtccggaccaggtgccaagttccagcctcttctaggtttgactcctgttgcctgttaacctcccctgatagattaaaaaaaagaaaaaaaaaaaaaaacctagagagggttttcatgacaattggcttccttctggagaatctgcatttcactggataagggagattcaggaaaagcccctctgcatttgctatttcccaaatgccttcagcttgaagtaaccagcaaaccaattcagcatatttgggctggtatttcctggactcgtgtctatgaggcagtgcttcttcaggtgctgttcaagtcttactaaatttatgtccattagatctatccatttctgcttctggttgtgagtttatcaattacttctgtaattctaataattttattgtttatttcagatgtctgcaatttgagaaatatttttctgataaaatgttctttttatcattagataatgatcttctttatcctgagaatgtttttgccctagtttctatcttgtttgatattaattaattcagtcactcactcagcaatacctgttgagaattttttttttttctgagcagagtttcgctcttgttgcccaggctggagtgcagtggcatgatctcagctcactgcaacctccgcctcctaggttcaagcgattctcttgcctcagcctccccagtagctgggattacaggcatgcaccaccacgcctggcttattttgtatttttagtagagatttctcctacatggggtttctccatgttggtcaggctggtcttgaactcccaacctcaggtaagctgcctgtttggcctcccaaagtgctgggattacaggcatgaaccaccacacaaggcctattttttttttttttttaagacagggtctctctctgttacccaggctggagtacagtggtgagatcacggcaaccttcacctcctgggctcacatgatctccctgcctcagccttctgagtagctgagactacaggcaggcaccaccaagcctggctgaattatttatttatttattaattatgagatggagtcttgctgtgttactcaggctggtctcaaactcctgacctcaagtgattctactgccttggcctcccaaagtgctgggattaggcgtgagccaccatgtccagccaagaacctgttctatgccagtcacatcaagaaacaaaacaggcatcacctgacaatatatatatatattttttggagacggagttttgctcttgttgcccaggctggagtgcagtggtgctatctcagctcactgcaacctccacctcctgggttcaagcgattctcctgcctcagcctccctagtagcttggattacaggtgcccgccaccacacccagctaattttttgtatttttagtagagatggggtttcactacgttggccaggctggtctcaaactcctgacctcagacaagccacccacctcagccccacaaagtgctgggattacaggcatgagccactgcacctggcttgacagtatctttttattttaatcacctttttattttttactttcaaccattctgtgtccttctgttttaggtgtatcttttataaacagtattaaattgaaactttttttttctttaaatgtaatcttggtcttttagcagggatatttaatctgttcacatttgttgtgattgctaatgtaatcaaatttggttttactaccatatgttactaattttatatactatgctgtttacttactgtatttccccttttcctgcttttcattgtacttagttctctttattttttttaagttttatttattttattatagttttcttatttattctactttgcttatttcttcctattgatttagaaattatacattctattttttcttttggtgattacatttaaaatttaatatgcatattttatttgagtctaaagttaatggatatttctctgctctccttctgatcaaaatgcctcggaatattttggctctgatattcactcccagtctttcgtattccctgtgtagcatgttatcagagtctagtacttaactttttggttcatttttttttcagtactttgttttaaatgagacaacattataattgatattgctggctcatttagatttacttacatgtttactctctgctcaccatcgctcctttggatcccactcttttcttttggattgagtctttttatcctgaaatataccattggtcacttctctcagtaaaggtctaacaatagtaactttcttcagcctttgtatggagaacgtgtttattttgcccttcctcttggatgattgcttagttgcgttcaaggctaaaagctatattctctcaatactttgaaaatactattccattaatttttggttgattttgctgcttagtaacattctgctgtgaagaaaaattgttcttttttcatgggtaatctgtcttttctctctatgtgttctatagtttcactattatgtgttaggtgttgatttgtgattgtttatctggctcctgactgtgctgttcaatctgagaatgtaaatgcttctttccattctgaaaacatctcagtcataagtcctcattctttctattctctcattagcatttgttgtaaggtctcatgttccctcgtttcttaacatcttccatctcctacttctctgtgccatgtcctgtatgatttccccgcatccattctgtagttccctaattctttttttttttttttctttttgaaatggagtttcactcttgccgcccaggctggagtgcagtgatgtgatatctgcccactgcaacctccacctcccaggttcaagcgattctcctgcttaagcctcctgagtagctgggattacaggcacccaccaccacgcctggctaattttctgtatttttagtagagacggggtttcaccatgttggctaggctgatctcgaactttgaccgcaagtgatccacccgcctcagcctcccaaagtgctgggattacaggtgtgagccatgactcccggcccctaattcttttattggccatatgtaatctaatttacttactatttcagtgactctgtttttttccttctaaatctgctgtttggttctctttcaaattaatttttctttttttattttctttttttaaatatatatatatatttttattacactttaagttctagggtacatgtgcacaacgtgcaggtttgtaacatatgtatgcatatgccatgttggtgtgctgcacccattaactcgtcatttacattagttatatctcctaatgctgtccctcccccctccccctctaatttttattttcaatcgtgtcctattctttcaatggttactgttcttgtgtcactttaatagctctaaacacatatatcagattcttttttaggttgtcacttgtttccagttcccaggtacccattggcccgcatgttgtacttgctgacccttggcgtggtaggttagttcctggcctggttggaattttttattgtgagctcatcttcagcaggggttatttttgcctctgggagtccaggggccctggattgtggagatgtttctggagcactgctttacctttttcttctgcaaaccaaggctcagttattttagggtcttgaacaagttttaatttttaatttctctatttgtgatttccaacccatctgggtggtatcaacttaatccctgcatttgctcttagcacaggctcctgattcagatgattcatacaaaagcttttagttacttttcagagctcaagccagacctcaggcctccttcctgtttctttggtgagcatggttcttccagttcccttttcatggactggctagcttcttaaggggtctggtttggtccagtttccccctcatcttgcacagtcctggctggtgtcttctttccccaggggtgttgacactctgacccctacttattgtttcaagggctgacagccctcggtggatacatcagcttggaggtttcctcccagccctggagatttgctttgtttctggcacttgggaatctctctttcctctttctatcaagctgagctacgcatgaaaccttttttttttttaagttgctttagattttccaatagctgtgtgtaatttcagcaggagtgggtccgcatcaactcagcctgccacaaaccttattcatctttgtactctccaacccagaacagtcactggttcataccagatgctggatgaatgaatgagtgaatgaatgaatgcatttttcacttccagtagcagatagaagcagtattccagtgagccatgcctcctacctctccaggagcactgaatcaggcagaattcacttttctttgaggttatacgtagagagttcccagtgaaaaaatgaaaagagaatagggcttcttctatgcttttgttttaagtcccagaacaataggactgtttaactgctttgcactgcttgatatatgaaggtggactgacgactgagttcccatgccgcttgctggtggcttcacacagcatcattaccaagaggacaggacactaggactgtttacttccccctttctcccctgttttaagaaaagtgtgcctttgatgagatatagccgcaggctcttgttttacattgtacgtcaactgctgttgtcagaggctggttattgatgccatgccctgttttaattcacacttctctgctaatcaattacagcgtttatccattaatcaggcattctgacagggtcaataactgctttttggctcttgtgcagggctgcacgttatcaagccaggaataaggcccaggagctggctttaaaacaccgtgtgactttcccaggctggtggacttccggagcaataaacatctagtggggatttcatatggtgggtttttcatatatttggtagatgggattttctcactgaacacttcattaacagggctcaacgttagtgaagtgtggacaggtgtgctctgtttaagaaaaacagaaacatcaaaaggtaattattgccatcacataccaatgactgcatttacctaaaagtagcattaaattatgagctttcttcttttatattaaatgtttacaaacagtatcttcttggcagtagggtttgagagcaacgactcttaaagccaaaatgttggagctgctgctggatgaaaaccaatctgaaatttagattaaatagggctgtaatcgtaatgtgagtcaagaggaaaatccgtagtttctctctggaaatttcttgaggcccatcttttccgtggagtgttttaaaccttcgtatccatgttcccatccatgggcacacgggcatcttcagtgccccttagtctctctataagaatttgttacagcatattcagatgtggtaaattgtcacagaaatgaaaacttttcattttagtaaggataagtaagaaacagaggtgacaaggtttaactggagagttccagtttgggtaggtaagttaccattcatcatgatggttacaggtttcagtgatcttttttgtgacagatgtaccaacatttaattgtttttcatcaagggcggagagaaaagacacttgtgtagatttttcaattctcctccgtgtcacttggctgtcctcaccattgtctgagctcctttctcttatcctttttgctgcaatgagttgtgtcattccctcatggtcagcacttttgttgtctttgttttttgctgtacctcagaagtccatcttttctttcatctctttcccattcatgcatgagggaacagttgtgccctgttgtggggatgttccgctgggtttcaaacagtagggtttctttttattctcttctaagtagtacaatggggctgaatgtctgttgcagaatgcacacactaatatgccaggttatttggtttctaagaagtcaataaaaatactacatttaggctcagtctttggcttgattttcccctatttgcctttcaagccttccgttatgaatctgtttgtttctgattgtaaaatataatcttgcatattaaaccgaagcgtggaatcaacaaacactttgaggaaaatgttcctggcggtggagtattttcacaccaggcagggttggcagccggcaccctcccttgataagagcctggaaacagcccccagagcaattaatggcagctccgacttggagaagatgaaaaaaaaaaaaagaatggatcccaagttggtcttggcaaaactttctggtgtaagaaaccagctcctctctgcatttagagggtacagctgtgattgttttcgtgcagacttctcactcagttcttgttttggtggggagttgagcacgagcagaacgcaccgagttacacacacagacgcaaaggccattgcagcagcaaaaggctaaagacataaaaagttagagatgtcttaggacactttgttcttatattcaggaacaatcttcaaaatcctccttaatgaggtcataaaagaaaaaaatggaacaagtgttccttgtgtacctctctagggcgtgtcgttggggtcacttgccaccagtatcctatttaaaaagggattggggtagttcaatcaagcattgcattaagagagagactttgattaattccttctcttttcttttgtgctatagataatttcagtcaatttgtgatactttcttcttagccattgctgaggctgaaagttcttgatgcgtcctgctgagtattagcatttctcgggcctacttggctatggggaagaggcacgcactgcagacagctctctaagccttgacaagcagggctggcctctacacatgaccgtgatctgggatatcggtttaggaaagagcccgctctcaggttgctggcagaaaacaaatcttgatgtaaaagaagagaagaccgaacagtaagatggtgacttgctgtggtaataccgtgcggtttttttaaggttctggacctgcttcttactcagaagctcacagcttgggtaagtttcaggaactgctctcaaggggaacaaaagaaaaggaaaagtgagggctaacaatgtgagctttcactggggctgttgtgggaaagttgaagattggccccaggatggtcaggatcaggtagaaaactggattctattgtcatttgttttcttttattgaccagctttcttgtttgtggagagggcagcagagagatgaagggacattctagtactatgctgtagaaactcagtgggaaatgttaactgttttgatgttaggatatatctaaaatgcttagttaaactgagtcccatacctgttgtattttataagctcattttggaaaatgtacgtaatgtttatttattgtaaatgcaaggtctgttcggtatccgtacatttccacgccgctgaaagggtggatttggttctgatggactggaacggctcccggggaggcattgtggtgtttgcgtaaatcccctttcctttttggtttactcatttgatgcaggagggtcggttcttgggctgttgctttctctcctgttaatccagctactgcacatgcgcacgaaggcaacaggttaaaagtcctaatttaagatagctttgggtatggagagataaaatccctttttctccagttgaagcatctgtttttcagttgagtgtagatgggttgattttcatgaatgtatacatctaatatgtttatgtaaacacattaaggcaagatttcagaattaatttcagagtatgttttatgataattactgctattctgccaaaagtttaatagccaatcataagaattttcttaaattattattttcaaattaataaggtgttagacttctcatttgttctttctggtactgttttgagattaagaactcaaagatgaactcattcattcatcaaatattatttattaaactcttcctccatgccaggctcattgtcataattatcattgtaattagtctgtaacttatatttacaatgattatgtaaatagcggaaacacctaactatcctgcttcttggtaatcaggtttaactctccatggggtcggtgtgttctttctgaagcatgtctttgaatagattactcgggccttcccctagttcttggaatgctaactgaaattgtgtgattgatagatttccccagacttaaaactggagagatccatgggggcagagtggttccatggaggcagagtggtgtcatggagaggacacaggctgtcgtcatttacttttcctgccctgaaaagggaagagccagcagctcaggggtcggtgtgagacttaaactctgaataatgtaaagcggctggcacaggcctggccctcagtgcgtccccccatgagcgcccctcccccgccccttatccctaaggcagtagtgtctgtagggcctcaggcacctacattctcatttccttcatgtatgcagagggccagggaagttacctggttaccacttgctctgtgccacaaaaaaggcgtgcaaggatgtacatcagaacctggttttgactgggcacagtgactcacgcctgtaatcccatcactttgggaggctgaggcgggcagatcacctgaggtcaggagttcgagaccagcctggacaacttggtgaaaccccatctctactcaaagttcaaaaattagacaggcatggtgtcacacgcctgaaatcccaactactcgggaggctgaggcaggtgaatcacttgaacctgggaggcggaggttgcagtgagccgagataatgccactgcactccagcctgggtgacagagtaagacttcatctcaaaaaaaaaaaaaaactttgtttctgtgcacaatacctcaaagacttgttaggcctggggaatagacctgcctcatttgcttgtttgaagcctaattgcaggtatttctaatacttcctacagtggatttctctcgtcttccaaatgttgcttttccacagaattggcgtggtaattgctgagaagaaagaacttccttaactgaatcaagcctgcctccacctcttttctaggattgcaggttccttttcagataaaggtctcaaaagggcaggcagggcagaaggtcttctcataaaatccgaggattgtggtcctctgggtgcttcatctgctgcaaccaagtagaaaaaaaggaataaacacaaacacatttcactctgcctccaacaaacctccttcaggtcagatctagtatccaagaagtaacaaaaatagtccatctagcaaatgagccattttctttgagagacaggcaagcaagacacctgggtttgtctagatataattagttatttctcccgtggccagtatgggagtaaacactatgcagtaaacaccagctgaagaacattgtcctgtctatctcaggacagggaatgatagataccttttggtctctacttaaagacagtattgccgggtgcggtggctcatgcatgtagtcccagtactttgagaggccgaggtgggcggatcacttgaggccaggagtttcagaccagcctggccaacatggtgaaatcctgtctctactaaaaatacaaaaattagccaggcatggcggtgggcttctgtaatcccagctgctcaagagactgaggcaggagaattgcttgaacctgggaggcagaggttgcagtgagcagagatcatgccactgcatgtcagcctgggcaacagagcaaaactgtctcaaaaaataaaaatatagacaatattagtattaatattacagatcccattatatttcttttcatgagttttgtgagggtattccccaaagctctgtgttttggtgggggggattacaggtgtgagccaccatactggccccctcccccaataaatataaactgggtacttattaatacttaatatacatatgtttcttttcttttcttttttttttttttttgagatggagtctcactcttttgcccaggctggagtgcagtggcacgatttcggctcactgcaacctccgtctcctgggttcaagcgattatcctgcctcagcctcccgagtagcagagactacgggtgtgtgccaccacatccggctaattttttgtatttttagtagagatggggtttcactgtgttagccaggatgttctcgatctcctgacctcatgatccgcctccctcggcctcccagagtgctgggattacaggtatgagccaacttctttttttttttttctttttaatagagacagggtctcactgtgttacccaggctgaagtgcagtggtgcaatcacgcctcactgcagcctcaacctccagggctcaagcagtcctcgcacgtagctgggaccacagttgtgcaccaccatgcctggctactgtgtgcttttttgttttgttttgttttgtttttgtagagatggagtctcattatgttgcccaggctggtctcaaactcctgggctcaaagaagcctcccacctcagcctcccaaagttctgggattagaggcatgagccaccatgcccagccccaccccagtaaatataaactgggtccttccttaataccttaaagacagcaattttcgacatattcaagacagttgttccttctgctttggaatgctgagagcttctttcctcataattgtgttctagaagttctgcagggccttgctatgggaaccagagaaagcagaatggccagggccatccaattgtctccttcccagagatcaggatgaagggctgtgttaaaagatctctctcatcttcagctggaaacaaatagtactgaaaagaatgatctggactgtttctcttgtcttttaaaagtgtgaggcctaaagaggggagagagtatctttgtgctgtgttatgcctgacacattgtcggtgaccaacagatgtacttggccatttatatggggataacatacatgtgatcttagccaaaaggccctccaaaccttccttcagcagccctttagattgggctcctttgtcagtcatctgcttgagtatcagctatgctgaaggaaaagacatagggaatggtggttggaggtggtggcagccagagataaatgtatctctgaggcatggtttcatctggtcagtaagatgtgtgcctttggatctgcttcgggctaaatatcttaggggtttggtgggctttagaagtgtgtgtaaatgggaggcgggaaagtgaggccggagactcatcatcactgctctccaccctccagaggggactgcggaaagcgcagccagccatcggcctgttgacaaggcactggcagtcactgaaaaattcttttcctttctctgtcaattagcaaatgatggtcttctactgataaagtttaggaataaaggagaaagaggaagatggaatcctggaccactttcagcctgcacttgagtattccttatgtgttctcctgactccctggtgccactaccccctgccaccgtcggccctgtggcagtggggcccttccccccgccagcctcggcaccgcttcagtgtggctggtgcctccaccaccattggtactgtgtcagcattgctggtgcacctgccaccgtcggtccctcatcagcattgcccatgcccccaccaccgtcagtccctcatcagcattgccggtgcccccctaccaccgttggtcccacatcagcgtggccggtgcctccaccaccgttggccccacgtcagcgtggccagtgctgcgacccagttgctggctggaggatggctggccactgttggagctgctgatctttccaaggccttgtcacagtggccatagatctcaaggtgcacccaggacactcaggaaaccagcctcttggttaggcagctgaggcctcacttttctgcatccatgtactcctttggtatctggatcttccttttaaactttgactaacacgtgtggcagaaccaatcaccaccacagcctgcaagtgcactgaggacctgtcaggcccaggggaggtgcagcacgctcatgggggcagcccagcactgcccaggtggctggagcgagtcacggggagagcagaaagctttgggcgtcctggctgactggcctcttagtgagaatacagaacagctcctggcagcactttcccttccagctttcctcaagacaggccatgccaggcgaagaggaagggcaaggtggctccctccgggtatggagatggggtgagcctggggacagtggagcctctgagcagaggactccagaggctcagggagcagcagagccgcccaagatgatagacaggagctgaaggccagaggggaccacgcctggagtcttggcgggaggagcatggacacaggaccagggagggagccccagaggcagtgccgaccatcctgctaaacacacggaacggcctccccattctttcccctaaagagtaggggcttgggccaggcacggtggctcacgcctgtaatcctagcactttgggaggccgaggcaggtggatcacctgaggtcaggagtttgagaccagcctggacaacatggtgaaaccccttctctactaaaaatacaaaaattagctgggcgtggtggcagatgcctgtagtcccagcaactcaggaggctgaggcaggagaatcacttgagccccgggggctgaggttgctgtgagccgagatcgtgccactgcgctccagcctgggtgacagagtgagactctgtttcaaaaaaaaaaaaaaaaaaaaaaaaggcgggggcttggagaggagaggaggggtcctggttttgttgtactttgttaatatagaccagatttcggcagattgcactgtataaagaaaaataaacatggacagaaaagttgtatggtcaaaattgaagtagcaaagccttctttaaaagttgaaattacttttgtttctttactaaagcacaaagtctagttgcagaatatatgtctatcttagcctgctttaagaaaaaaaaaaaaaagcggctgagcccaggggctcatacctgtaatcccagcactttgggaggccatggtgggaggattacttgaggccaggagtttgagatcagcctaagtaacatagcaagactctgtctctacaaaaataaataaaagactgcagctgcttatattaaaaaaaaaaaaaaggccaaagaatgcctcaaagcattgaaataaaacttactgatggtttcaccagcagaacagagacattggccactgtttaagctgtgctagatgataaagaaggccatacattagtttcaaagtcagagtagacagaggcggagggtagataggtgttagcaggatggctctcacggacgtgctggggccacatggacagtggacccctggatggggagggaggaaggaagggcctcggacatctcctgatgtgaagaatcctgtgttctcaattttaacctctttgtttctagccaagaagtaaactgaataacatactccacaccagaatggtttcacttagctttcgtatctcaggaactgggcttcagttctgcagtgagaactgtcctttaattgcttctcccctggaggctgatgtggtgacatactttggagcacagggcatacaggcatccctgcacgaacggtaccaggggcttgggatggctgcagcacattctgctggggctttgttttccttggggctatgtttgttttttctttttcccttctttcttactgtttcttttttctggatgcattatgttctttaaagactagtgattttccacaccaaattattttagaaatttcagcattatatggcagttttttttttttttttttttttgagacagggtcttaccttgtcaccttgtcacctatactggagtgcagtggcacaaacacgattcactgcagcctcaacctccccgggcccaagccatcagtcttccacctcagcgtcccccaccaacaagtagctgggaccacaggcacatcccaccacacccggctaagttttgtatatttcgtagagatggggtctcagcatgatgcccaggctggtctcaaactcctaggctcaggcaatcctccctccttagccacttacaggtgtgagccactgtgcctggcctattttaaaggtgttttttctttctttggtttcggagagaaatcagtttcctgtgtatcttaagctgtgtggatagggggattgtgataatgggtcattattttataattttgctattttaaatgagttttaaaacctgtagccagtttctgatctcagggaacatacctattaactcaaggtgttacaaatatcttgacagcttaaaaattgagttaagatatgaaaataagatatgaaaatatgaaaatactgtgctgtaatacaagaggcattcattaccttttccctgcccatcagtctcgacaggataactttacacttgacccaaagatatttaaaaatacatccgctttctttgaaacttctgtgtcagtgtttttcatttgaatgattaacagaagcacattggtttgtaggtaaatagtaaataggtaattctacttgtttttctaatttttaaaatgctttacaaataattattaatgatactgtatgattaaggaaagggaatttgtatgaagctaatttgaaggtaattggcttttgcatttatttattcatgtatatatttaattcgcatctgttatgtgtcaagtatagtgcaggagtcagcagaaaaagtaattcctaaaatcatggctcttgaaatcagttatttgtctttgtttttcctcctcaaagattactccctgttcagtcttgttaatgtgatcagagatttatattaacttttaagatctcataatcccaataatgtaagatatagtagagatgagtagagaacagaacttaaaaaaaaaaacaaactgtaattactaggaaattgactctaccagggaaattaacagacttgtccaaaattgtccctgtagacagagagggctggtaaggctggaatgaacccgtcgtaatttgaatgcttaaaactttttccattttattgtcaaaattattgcctgaacttcctttttctcctcatttgcctatttcccttgctttttatcttgtgcaccaccagtatacaacatagtggtgtttaactacttcctgaaggcattattagtcatcaggaacaccaggtcattatcgaagtagataaatgggcattccgcccatcgactaccccttggactaatttggaaaatatggttccttccctcagaagaaacagcccatgctcctctggacacttataaaatagccatgcgcacgtctctgttccttctgaacaactggaattaatgtgtcctgcttgatgctaaactggagtttaattcacaatggcaaggacgcttcacctagaatatctgtccatgtgaaaggtggggagcagtgcagcttccatctccctgtctgttttttggtgggctttcagcttttctgtcccatgactgttagtgactgcagcgtaaccccaaatctttcaccagatgttgtctcaccatcttaaggaaagaagaaagttctaatggatgttttgaatgtgctcgacttttattttgttcagacccaaactgaatgaggcagaggttaaaatcttttcttgttccatctgagtaagcacgaaaacctatgatccttaatcttttagaagaaaaataacccttctctgttagtgggatttctgattcatttcttctgccctgctcccctgctctgcatttttttagtcaaatactgtctggacttttgtgagccaataacctccctcctcacctcattcccctctcttcccctcccctgtgatcacacaaagagcagagagccctcaaaagcctgggtttctgggttttgtattttaaagagaggatgaaatacttgctgtacttcaaaacataaaaccgatctgttaaaactttcccaaaagaaactgattggcatcagcatagggggaataagaaaagtaagagaaattgagattaaaaaaaaaaaacaaaacggaggagaatgtaacgttggccattgtaattcataccaaactgactttcctttagtgcaaactagtaggcgtggcaatgacttcaaacctcccaagttagggagccctgaaatctttctacttactgatatctctgaataataaccagggcccatacacggggctgggatttgatagtcgaggccttcagtcctaaccattttgccctgtaacttagatcaggacctatacatttatttgtccatggctacacccatagacatatattctaacgcaggggccatgaaccaaatcccatgtactgcccatttttgtacagccttctacctaagaatgagtcttccagatgaatgattcgatgatagggaacattacctttgaaccccagttaagcaaaatgctgttccccccaaaagatttccgttcttctcacaagtagaactatattactatagaagtctactataaaatatagtagaactatattactataaaatctacccagttttattttgaatttcaccagtaaaaaaatttgtggaaatttgtgttctcacttgctataccagcgcatatataacatcttcccatttgtctctcagcccgcaaagtctgcagtatttactatctggccctttcagtcagaagtttgctgagtgctgctctaagctgtcacaaatagagatgattttgaagggaaaaaaagatattctcactatcattctttgtctttgcctgaatctctgttttagctttttgttgttgttgtttgtttgcttgtttgtttttagaggcagagtctcgctgtgtcacctaaactgaagtgcagtggtgtgatcatagctcactgcagactcaaactcctgggctcaagccatcctcccgcctcagcctcctgagcagttaggaccacaggcgggcaccattgcacccagctaatttttaaatttttttgtagagatgagatctttgctatattacccaggctggtcttgaactcctggactcaagtaatcctcccacctcagcctcccaaagtgctgggattataggtgtgagccaccacacccagcatttttttttttttaagagtgaagtttctctggttaatgtgaatgtgagttaataggctctggcttgtgcagtgcagtgccctgagaaaactgatattaattgtacagttgtgaaatgtggtataatattgtcaatagcagcttgtttaaaaaatttagattgcaaaataaaataaacctgtgtttccatatataaaacaggcagcaataatagtacctacttcaaaggactgtccaaaggattaagtgagataatgtaaataagggatttaataaatgttaaagagaaaaaaatctaccattgagaatatgtttgtttgcacaagacttggtacctttatcttagcatactgtatcttagacagatacagtatccctaatacactgtagatacctaaatcatgcttctcatcgatttcagttaatacaaaatatagtcctatatctcttttcaacacaattctgattttaaaggaagggtcttcttaaaggaagaccattgtttgtttgaaacagaattactatatcctatacgtttcttttcttttttttttttttttttttttttgagctggaatctcgctctgtcatccaggctggagtgcagtagcgcaatcttggctcactgcaacctctgcctcccgagttcaagcgattctcctgcctcagcctcctaagcagttgggattacaggcacccgccaccacgcccagctaatttttgtatttttagtagagatggggtttcaccatgttggccagggtggtctcaaactcctgggtgatgtggccgcctcagcctcccaaagtgtggggattacagtatgagccaccgcacccggccatcctatatatttctaagataaaattttaaagtataagtaaatctcattggagagcaaaagatgaggttttttttttggttcagaaaattttaggataatggaggtcagtgttttgctaaccatctgtaacaaactgcagcattggaaagggacactgtcttggtattttgaagagctaatatttatgcctgggaatcctctacctgcatgaaatcggcaggtaagagttagaaatatgcatgacattttcaaggaaaaaaaaaatctgtggtgccacttgaggagatgaaatctatggtcctgcctgttttcctcactctgtggctcccagaatgcatctttgactctggagtttgtccttctccctccacggccagatttcactgtcactcctctgagaaccctctccactgccctcttatgctgaatgagcccctccccaccaggcttcaggccattggtttctaccagtgttcacattttttgtctgttgccttcgctggacctcaacttcccccaaggctgaattttgtcctcattttcatattgccagaccctggcttaggtgcccagtatctatttgttgaatcaatgaaatactgactaaaaattgtctaacactaaaataaaatgaaagccaaaaaaaaccctttagatttttctttcttttttagatatagacaatatacatagataatcataacattattttagtgctgattaaaaattcacagataagcccaaatttatatatagcttgtctgagggttaagttctgaagaatatggggggcatcagagagttgatacaaatccatctttattttctgcagggccagctccttagcccagcagcagctccccggtccccctgtaagtgtgtttcctagatgtggcaaaatgcctgccatggtgttccaggcccaagtgtctagctcatggaggtcagaggggaaggggcaagtgtcttctcagccacagtcgctgttatcaattgggcttcctgtgcacgaggtgcttcgtcaagggttttacatgtatcttttcattgacttctcacaacaatcctattattatatccaactcctaatatgaatctgggatttaaagaggttaagtaacatgcttagggtgtcaccaactccaggtgtgctgggttccaaagcccatgctcttcactgttaggctttccttacctctcacctcctttccagggaagtggcaagatttttggagctggcgagtctggggactcatgactggttgtttctccttgaagcatagactagaggagtcatgtgcgcaagagtgttgttaatcactatgctttcccctcctgagctcaagaaaaacagaactgtcaagagttaggaattgcgtcctggtcaccaggttccttgtttgtcccatgacccagagtggagtcatcccaacagagatgtgctaggctgtaagctgaatgtgataagggaggcaaactgcaccacagtgaagtcctccaacttttagaagaggctagctactgtgcgcgtcaattttttctaacctttttttttggtggcttatatgcaattacatacgagttacatttattgagtaccacatgcaggaagtcccaggcaatgagaaatgagcttcatggtaattgagaatgaagttaaggaagaaaattttattgttaatcaagggcttaattgcctccgggacattttaaataaatgccatgcagtacttaaggagcaatgttctgtaagtgagatgcaaaaattctttaattaaaccatggtgggtattccctgattgaaatatctgcctttatcttaatatttaaaccttcgtgattcatgtaacaacttaattagggatggagtaaattaaaggctccttgaaagaaccaatcagttgtataaaattggttaaaagtatttctgggataggcttctgtgtatttgtactgatcagaacatatctttggttcattttatgtttagctgtcatctcgagtaagctgtatttcagcctgtaggggacagatggtggctatggcattgtatagggcagacagttattagaatttgtctgagaaatggatcaaatgtaagggtttcttggccactgagaaaggagacatttccccagatgatgacttggatggtacctgcaattaaccaggtaggaggctgccaagtctgttcgttggtcagtcagtcaacacacctgagtgcagccacggaaaaggccttgtgctcaatggtgataagcttgtgtcagtgtcaaactaaacagacccagagattcaaggggacttgccagcctctgattgtacatggtaaaaaacaaaatggaaaccccgaaaacttaggtattcaaatgtttagactttactagatcactcagtttatgagtggcagagatgcctggtgtggagctcgataaattcttgtgaaaagaaggaaggaaatgagaatgggggcagttgcctgggaggagggagggggacaaggcttgcatctgtcactgtactgcacagcgttccctgactagttggacactcagctgtgactctcgtgctgttaacagacattgtcatgaggattcaaaaagtgcagggaatacacatcagtggctctttaaaaattcagggttggtgtgttttgccaagctaacattgtgatttcatttaatccttaaaaagagtaaaattgttctcagaagataccaaaatcttaaaacataggatcatgtctgtttttaaaaatttatttagctcaaataagcagccaataacaagatgaaatagtcatctaataatggtgttttataaatggttttatttggaaatttttttctcctaatttcagtgttcgtaatatgaaacagtcaagccctttaaaagggattgcattttcaaataaacacacttagacacaccgtgtgaacttagtacttgaggaaaggaaatgaggggaggaaaggaaaatattttaagtcatattttcatgaaggactctgtggtattcaacacgtgttggcagactctggccaggctcaaaaatgatgggtcgcgttctgcctactgttttaggaccacactggccagggtgtcccccaaggtgcctttctgcctctggaatccctgttacgggcccacggaaagcctgtggatgcccaccagctgctgaggggtccctgtgatggtttagatctgaaatcatactcagttctttggccatgttctggaaggctagaattgttatgtcactgtgagtatggaaatccctttagtattctacatgataattcagagcaattaattccattctaatttccatgccctagaagaactgtacttgtggccgggcatggtggctcacgccggtaatcccagcactttaggaggccgaggtgggtggatcacctgaggtcgggagttccaagaccagcctaaccaacatggtgaaactccatctctattaaaaatacaaaattagctgagcatggtggtgcatacctgtaatcctagctacttgggaggctgaggcagaattgcttgaacccgggaggcggaggttgcagtgagtcaagatcgtaccattgcactccggcctgggcaagaaaagcgaaactccatcttgaggaaaaaaaaacaaaaaaacaaaaaaactgtatttgtaaaaacctgaacaaagactatcatatctgcacaaagtctgtgaagaaaggaaaatgagccatgtgtactccagagcaactagctgcttcccagtggccataaatatgtcttgtttctcaaccatttccaaatgcttcaaacttaaagaaatttgtacgtgcccaggaacgctctatcttcgccttctctggcattagttctatgattctttaatgttgtgggagatatttatgaaatcatttcctctgactttagtgactctgcctttgagagctcaatggtaaatacacaatcagcatgtgtgctaagaggctcgaaagtctcatgacaaatgctgtcctgtaccttgcagggcaatgatgtctgtaagcatctttccttaagcacccactcactcgctggcttggatacagtgagtctcaagacatcttaagaaaattgccatctgagcatcacgctgcaggatctggtgttagatatttttgtggctacgtgggttcttactcatttcccctctccgtctgtcttgtattttctatgtgccggtcttgccttagttcatatgcattcaggagaaggtatcattagcgacttgacgcccatattatgacttaacgagctggaaagtccacacgtatagattctgcatctctcaaactgagatttttgattcgtagacaggtcgcccgtagactcttcccagaggctttggctgcttgggacacagattgtaatcacagtaattagcactgaattttcaagtcctgctctccagcttgacctggcagcatttaacggcgtgcacacagctggatcaatggcaggaattgaaggacccagttgtggggctgctcctggcagcctgtgatgggcaccgtccctggagaattccaggaaagcatcagggacaagggatggtgcagggacctgggtgcgaaagtaaagaaatatgatatttataaagcacctgtcgatgggaatcctgttcaaaattgttactggagacaaattgaagtacagacttctgcctgaaattcattatcaatgaattcatttttctccttcttgcttagttcagttttgggtatttctaaaatgttctttgttaaagtttacacttcctttccctaaaagaagtacttacagataggaatcttaaagctagtgggaaagaactgtaggacacaaaacagatacttcagtggcacaaatggggcaaagaagcacccatgcctgttatgaagtaaattctctaggaagtttggtggtgttggggagtcagggacttaagctcagataagccagaaggcactcctctgtcacccacttcttcatagtcccagggagtgtgtcaccttaccaggccactagaaggagagagtgacaagaacatggcagtttggcacggcagaccccaaccttcatccatcgagggcttgtgattttgtggggatacttgaaggctgactgctgaataaaaggtttaaacttacaggaaatacctctcaacacaaaaccatttgagcatatgtatcttttttttggggggtgggggtcgggggacggagtcccactccgccgcccagacaagagtgcagtggcatgatctcagctcactgcactctagtccgcgttcaagtatttgtagtagagacggggttttgccatgttgcccaggctggtcttgaactcctgacctcaggtgatccacctgccttggcctcccaaagtgctgggattataggcatgagccaccgtgcccagccaagcatatgtagtgtctctaaccatatgatcaatctagttgaaaaagcatggtaggcagagttttacaatgagagcttttttttaatgtttagtttccttagggacagaaacattattgttccattctaccattctgcatcagtagttcgtatgaggttgtacttttgcctttgtcacttgtcagcatttgcactgacttaagttgttagaatatttatgtggaaaatgagggcaattctgtgtgtaaatatctcacttgacaatcattttatgatttgaatgttcacttgcaatgagaccctgacatgttcacacgtgctagttttcagctgcaattacatttgccactaatttgtaccttggaacgtgtttactgaagccgctatggagcactcggttccgggagccctttcactcatcaactgcttctaggtcgcaccttgcactgggagaaacctggtgtctttctggaaaattccttaccattcaacagcttacccagtcatgcatttagcactttttcctgaaattctttcataaataagcaggaagccttctttgctatttttattataaaaggggaaatgaggataaaagttacacatgttgttattttaacatctagtcttgtatttgttgaagagttacgcttttacttaaaaacaaaaccagagacttatgcctgttgccagcctctgtcaatgatggctcttcattcttttaaagttcacagcagaaaacactgtgttaagctcttcttggctttaaaagccaaattagacacccaaaagtctcagcactttaaaatcctttaaaagatgatttaagtaaatcactttagaaatctatgcccaaacttttaaaaagtacttttcacatcttgcctttacaagtaactgtggaattagacacaccataaatgtactctgtattttcttaataagtttgaattttcggaaagcctttatttttatattatagagccaacacggctgttggatgttgaagagacccagccaatattattacacatttctttcttaagtgcagaacttggattgggacagggactgtttggtttggaaaacatcatctgttttccttctcctcctcctttccttctgtgtttatttcatttggtggctgcaagttgcaggtttttttccacttcacacttttgctagccctcttcttttcttctgctttacaatttgcactagaagagggtagcgggctttttgtttgggttcgggtttttttctttttctttttcttttttttttttctttgcatcttccttcctttccacagagagattgctgctgaccaaatttaaaacactacagtgtttaggatccctgcagggccattttaagtatttggagccataaagggccccaagccataactacctgaattgcttttaattacacaatatagctgcatcattttacttcagattctttttgattgatgctgcagggcaattgtaaccgcgaatgatgggattaagtgcctcttgaagtgactttagcttcttgtgggaacaaagggaaagaggagaacacttagtcccttttttgcctgagctgcctttttcttcacttgcgtataaagaaatacaattaacaaacattatccccagaggtaaattgaaatgtacatgcagacaagaaccgctcttgactgcaattagacatatatgatctaaggtattctggccattcattagtgctaattgtttgagaaacaagcccagaacaaatgattaaaatgtaggcgccataactgggattattagcatgtgtgataaaatgcacactctgtggctgtactgaggaaacgctttggaaagcagctgtgatttgaagaatggttggttcggctctgtggtgagctctcttggtgtttgctcaagacctggtggtgtttataacaaacaacttacatctttctttcttaattagtgggaatcacaatggtattttgtaatttaattgtaattacaaaattgtaataaattgtaataaattgtaattacaatattggtattttgtaatttaaaatcctatcgctttcctgcgcctttgggttgctcctgcagtctagcggtattgcggggactcgggataacctgaattcttagattttgcttctacactccactttctttttttttctcttctttcttttttttttttttttttttttttgagacggagtttcgctctgtcacccaggctggaatgcggtggcgcgatatcagctcactgcaagctccgcctcccgggttcacagcattctcctgcctcagcctcccgagtagctgggactacaggcgcccgccaccacgcccggttaattttttgtatttttagtagagacggggtttcaccgtgttagtcaggatagtctcgatctcctgacctcgtgatccacctgcctcgccctcccaaagtgctgggattacaggcgtgagccaccgcgcccagctacactccactttctttaaaatgttggaggccagggagaaccacttgaaagtttgctcccttatttgacttttgaatagttactcatcacacctacactgtagtgtgagggaaaagttctgagatatcctctggcatttggaacttctcttaccatacagagacctggcaggggtgacctagtcagacgtaaaccatctgggagctggctggtccatctgagcggccagcagtctgcagggttcttatgactgaagggactggttttgggatgtgccaccccagacctaaaatcgctaagccctctaggacctgtacaagtggagaacgcctaatccaagttaagtgaccaaaggagtaagcaccaattcagagagatagatggcgattaaatttcctatggaaatgcatttaggagctgggacctagcactcagtgagagagatgggaggtacccagggcaagggaaagagaagatatgagatgaaagaggaacaaaggagcaatagagggctcaatggggagtgtgctgagcaggcagaagctgcatcccaggtagtaggtctgtctgctactgggtgcttcagggctccctatttggagctcagtgtttctctgtcctccacctgcattgctgcatctggagtcacaggcaggaccatttggagattgtccatttggtgccatgaaaacctgcaacaacctttcaatctcaagtgagaccacttgagattgtcacccaacatacttccccagccacctatcccttagcatgtcattagcacattccaagggaagacaaatatcagcgttagctagagaggatataagattaaatttgcttttaaagtcagctaccaaattcaaaagacaagcacaaaagattttctggttctctccatctctaactgacctattctgtctttcttgccattgttacagaaaatggaattaagtcacaaataaaccataacatagattattatagacatacagctcttaattttcagttttattctttttgtatttacaagaaaagtgttactctctgaatttgaccagttagttccactggaaactaagtaactgtgtatattccataagagtgggtttggcagggagctgaaaataaaggggaaagaaactgttttgcactttaaactggggcattgctgtgtggtactgaattaagaaaaaaaaatattaagctcccttaaaattagaggaagttctaggaagtcttaccttaaatagatatttaaaggaattagtgcttatagcacattaaacatacttcaaaaacaaaacccaactatgttagaaaagccttcacgatcacatccatatgtttagttttaatttgcatcacacttagctctgaataattaagaaggaaaaaacaatcttaatcttatcatgggtcctatacaatcaaagccacatacacgtgattcgtgatcacagcttgtattcacagctttcgtgtgtgtggtatgggtctggcaattagactcagactgtgtttttttctaaaaattattcagtgctagagagtgatcaatattaaactctcccaaaaatgtacaaatcagaataatcaagggactgtggctaaatagaaaaaaaaaaagtcaaaattctaagctatgtaacattttggcctcatttcattgagattgacacttgaaaggaatttttgagagaatctaggatgaaaacggagatttcattaacccaggtcattttcatgacagttaccaaaaaaaaaaatttttttcagatgtgggaagaactattttctcaaaattgcagagccattttctagaagaaaaaaaaaatgctcttccatgattactttcatatcaaagtacccagtcttgggggagatgcattaatttgacacgtttagcagcctttgagcttttgaaaaactctgtaaaagaatccatggttacatctgtcaggttgacagtctttcgtgacctttaaaaaaaagttaaggagaaactgatctttttagttcacatttgctcagttacctctaactgaacaagctaggaaatagtcatttcagctttaaatactatttttttttttttttttttacatagaatcaccagtactaatggaatctctaaatggaagagtttagtggatatttctggtggtctcatggtaatgatatgtcctgtgctcttcactggctatttcaatacattagctactaaatattgtcttttctgcacctgtttttagaatcagatctccttaggaagatcaacagtgggcattctaactaggggcctctgctttgaatgttcctcattggccagtaagggaacaagtttcttctttgttccttacacacagagttccaggatccaaaattattaatgatctctacagaggcaaagagaactcaggctggcgtgtcctttctgttttaattacaatttaccaaatcctcccatgtcatgcacttgacaggtgctatacctcatagttcccaatgctgggattacacttggaaatccatctatcaaatctctttgggtagagtcctgagcagtcattcttggaccaagttctcagcgacattaacagttaactattaatgaacaacatcctttgactcctttgtgtttccaggagcccctgctagaagcagcccagaaacagaagagatgctaatcgcattgtgtgcctgaacgtgttcagtgaaggagcgcaggtttccctcttgacctcggagtcacggcaggaaaaaaaatccctccagttttccgtcagataaaacctctgctcctccttctctcaccaaaagtagagccagaaagtgggattaaggcaaatacccactaacaggcacatgcgccattgtcattccctcttccacacaaaacaaggagctttgcagaaaaacaaaaagctcctctcctctcccccccgccccacccccatgctccctttcttttcctcctcccctcctccttcgttcctaccctcccactttcttatccaccccggctttccctcagctgccccccttctcctttttctggttttctctctcacctgctctcaaatgccctctcccccgccttcctcttcctccttgcctcctgccgctctgatttaggccaactctttcctcatcctcatcctcctttcagaaaagcgtcagtgtttaccctcaaaggagctaccgggtgcccatgtgctgtgaggtggagccactccgggagctgccacggccacatttatagaaagatgaacccacacgggagacaaacggggctctctctgttttcatggaaaaactgcccttttatttgggattcatgaatggtcaccacagtggtatgggtcttcctgttcctgggacttcgctgacataagccatgcacctgcctggacaactagggctgtgtggcctcacaaggcagattcagtgagtgacaacaaagtgctaacagacagtagcttctggtccgtgtttgtacagcctaccttaggaggccttccttagcgagggccagcgtgtggtggactcaatatttgttgaatgtgtgttttatcctgaatctgatcaatacgtttttgtttatgaaatgatagcatggatgtgataaggccaatagatggggtaattttatttttttaattgtggtaaaatatacataacataaaatgttaaccattttcaagcatgcagtgcagtggcgttaaatagtacattatgattattgtgcgaccatccccaccacccatctccagaatttttcatcttcccgaactgaaactatacccattagacaaaaactccaattctctgctggccgcagtggctcatgcctgtaatcccagcactttgggaggcccaggtgggcacttgaggtcagaagttcgagaccagcgtggccaacatggcaaaaccccaactctactaaaaatacaaaaattagccaggcatggtggtgagtgcctgtattcccagctacttgggaggctgaggtgggagaatctcttgaacctgagaggcagaggttgcagtgagccaagattgtgccactgcactgcagcctgggtgacagagcaagactctgtctcaaaaacaaaaactccaattctcccctggcaactatcactctagttttgtgttttttttttttttttttttttttttttgagatggagtctcactctgtcgcccaggttggagtgctgtggcacgatctcggctcactgcaacctccgcctccccggttcaagcgattctcctgcctcagcctcctgagtagctgggattacaggcacctgccactacacccagctaactttttgtatttttagtagagatggggtttcaccatgttggccaagctgatctcgaactcctgacctcatgattcacccggcttggcctctcaaagtgctggaattacaggcatgagccaccgcgcacggcctctagtttctatctgtatgaatttgatgactgtaggcacctcatggaagtgagaatcgtagaatgtctgtcctattgtgtctggcttatttcattcagcataatgaagaactttaatttttgacatggatgcttgtttgctctctcattctgtgtgaaaaaagacttccaggcaggtcgcctgtaatcccaacactttgggaggccaaggtgtgcggatcacctgaggtcaggagttcgagaccagcctggaccacatggtgaaaccccacctctactaaaaatacaaaaattagccagtgtggtgtctggtgcacctgtagtcccagctacttgagaggctaaggtatgagaattacttgaaccctggaagtggaggttgcactgagccaagatcacaccactgcactgcagcctgggcgacaaagcgagactctgtctcaaaaaaaaaaaaagaaaagaaaagaaaaaagacttccgtcattgggacacttgtaggaacgtccctcgcccctggtgtcccgatggtctgaggaggcagtacgctgcagtgagacagtataacgcaaactttactaaaccggacaagaataaggattctgcttttttcttgactcttgccaagcctgtcctttatctgatgtccaacccttttcatgggtttccatgacaaatagagtggccagggtagaccaggagggccgttccttcccggtgcccctgctttgtaccaggaaccccacaatagccagaaggctggcctaggagttgcccccatcctgtaccctgagtccttccttagaagcaaagccatggtggaccacaaactggcttcccttgtgtatctgctttgggcacaaaagaccatgtcttcatttcagcacaaaacagtgcacttcattgaggtgtgatataattgcttcaggagagagtttgctctgaaaatgtcttctcggccttcctgaagcaggctgcacgcttatttatattggcaccacatgctaatctcacgaatggccctgttccgccagtgggaggacaaatagctgttcttttgctcccgtgtccatggaaagctcccctttctccttgcatggttgccatagtaaccaaaaaaaaatagttcttcaaaatagggaaggaatctctcagggtacttgggaacttagcaaagtgagaacataagtaggcctcaattatcatagatgctggtgtaaatacctagttattaatagtcaaagcgggttgaaattggtaggtgaattttgctgtcacttaagagagtagggaaagatgggtgaataggctcttaccttcactcagtactacagattcttctgtaaccattggaattgccagacgaggtcagacccacaggccatacaacacagaatttagtttttgttggcacagaacagagaaagaggcagtgacagagcacagttatgctcctgcgaccccctcagccccctcaaaggattggagatacagcgctaagtagaggaatccattacgaatctgtcatactgctgtggatatgtgcacacttttctgtaagaaatttttattttcaacctttatcagcccttagagtcaaaatctctttaaaggagctaaagggccacagcatttttgtgtggtattctacatagaaatttactgatggccaggcgcggtggctcatgcctgtaatcccaacctttagacaggtggatcacacaaggtcaggggttcgagaccagcctggccaacatggtgaaaccccgtctctaccaaaaattaaaaaattagccaggcatggtagcaggcacctgtaatcccagctactcgggaggctgaggcagaagaatcgctggaacctgggaggcggaggttgtggtgagccgagatcgtgccactgcactccagcctgggtgaaagaaggagactctgcctcaaaaaaaaaaaaaagaaagaaatttattgatgtattatttttaaataatgccctctttttttaaaaaaaaaatcttatgtttaagaacatataagaacttacttaaatttattagaaattgtggagacaatttccaaaggatatataaaagatatatctttttttctggttgtaaaacagctcttcagtggttactggacacgggtacagcttaaaaattttaaaaatatttgaatggaaatgtacgatgatatagccactgtggaaagaaatatggcaattcctcaaacaattgaacatagaattaccagatgatccagcagtcccacttctgggtatggaattgaagcacggactccaacacgtatttgtacagccatgttcgtagcagcactattcacattagcaaagaggtggcagcatccccagtgtccattgacagatttatggatatcaggatgtggcatatccatacgatggaatattattcagccttaaaaaggaagaacattctgacatacgctataacatggttgaagcttgaagtttttttgttttttttttttagatggagtctcactctgtcacccaggctggagtgtaatggtgtgatcccggcgcactgcaatctctgcctctcgggttcaagtgattctcctgcctcagcctcccaaaaagctgggattacaggtgtctgccaccatacctggctaatgtttgcatttttagtagagacggagttttgccatgttgaccaggctgatcttgaactcctgacctcaggtggtcctcctacctcagcctcccaaagtgctgggattacaggcgtgagcccctacacctggtgaaccttgaagatattatgctgagtgaaataaaccagtcacaaaaggacaaatacagtgtgattccatctatgtgaagtatttagagtagtcaaattcatagagatggaaagtcaaatggcggttgccaagggccgaggggaggagggaatggggaattcatgtgtaatggggccagagattgagttttgcaagatgaagagttctggagatagatggtggtggtgattgcacaacggtgagaatgtactcagtgtcactgaactgtacacttgacagtggttcagatggtaaattttgcattatacatattttaccacaatacaaaaatagtagtgtttcacatggtggggagtataaaatgatagcctatagatcagctcaaggtaggaaacaacgatcttaaaatgattcatggattattgttttattgctgttcaaatcaggaagttataaaactttccccagggttcagatcgccagtccctttccacagttacctttgctcactacacacattccaactcacaacacacacaacatacaaaaccctgggcgtagacagtgcagagggccacggatgggagagcaagccaggcactctcatatgccgctggtgggagtgtaaattagcacaactccattgggaagacagtttggtgaagccgacggagagcattaaataatcacactgataacctttttagccctctgaggacagaggctaatggaaacttgtggccctttctccttgaacattccctagcctgccacccagcctagcttggagtccattctttcattcattcagcctgcatgtgccagacatggtgctgtgagctccatgtatggctttgagccaagcagaccaagtccctgcccacagggggcctgtggcacatgggctgtggagttgcacatgagtgataccagctggggctgatttttgcagaaaaggaatttctgggaggctggtggacaggctggagaataggaaaatggacagtgaccaaactaagctcctaagaacacagcccagcccaggccagggcagtctggccagggtaaaccagactgtctaccctgccccctcctgctgctgtcctcctgctgctgtccctgcgctgctgtcttccctcctgccatcctgggcacttgctgggggcacctctttccttcaccggctcccaccttctttgtgtcaccccctcatggctcaaaggccccacctgcagtatctcatgggccaagcttatgcttgtggcctctccctagctttcaaaggatgtggagaaggaccgtggggtctctgcctccacccccaccaaacaggaagggtgttcctgtctgggacagccaaaaaggaaaaattctctgaacccagtggaagacagacagtgaacaagtaaacaaagccaataattcatttcaaaaggggaaggcctgtgaagggaagggcggggttctggaggacagcatcccaggagggggcatggggaaggtcctgctgaggacagggcatgtaggctgagccttgagggatgagagggtggcagacatgctgagatccagaagagccttccagagagggaaccacttatgggatggtcccgaggtgagcaggaagatgtggtgtgtcagggaactggcagcagatacctgtaactgagggtggtaagcagaggagacggatgggccaggcagccaggagcctgccaatctgggtgagacatttggtttttaatgtgagaacactgggaagccatggaaggggctcaagcagaggagcatcatgatttgatttgtgttttttaaagtccagactggctgtggtgtggagaagggactggagagggacagaggccccaggaaccagtcgggagtaaggtggtggtgtcttgggccagggtgggaaagatacagtgcagaggtgcgtgcaaggcacagttaacgcccatgtatgttagctctccagtttgtaatgtagagtaggatgtaagtcccatcctaaaggccctggcagggagctggaatgcatggaatacctgattgatactgggtttgattagtacgtctttaaaatttattgatacatttacctacatttattaaaatgacttagaatttattgtgctgttagagttattattttagtggcaatctctttttaacttcattttgaatttaaagagtgatgttatgactttctaaagccctgaaccaagttattttctgcacttagtcaagtctggactgctacttatatgactcaaaagtattatgacattggccgggcgcggtggctcatgcctgtaatcccagcactttgggaggccgagacgggcggatcacctgaggtcaggagttcgagaccagcctggccaacatggtgaaaccccatctctacaaaaatacaaaacttagctgggcatgatggcaatgcctgtaatcccagctactcaggaggctgaggcagaagaatcgcttgaaccggggaggcagaggttgcagtgagccaagatcatgccattgcactccagcctgggcgacaagagcgaaactcggtctcaaaaaaaaaaaaaaaaaaaaaaaaaaaagtattaggacttggccgggtgtggtggctcatgcctataatctcagcactttgagaggccaaagtgggcggatcgtttgagcccaggagttcgagaccagcctggtcaacatggagaaaccccatttctacaaaaagtacaaaatttagccgggcatggtagcacgtgccagtagtatcaggtaatcactacttgggaggctgaagtgggagggtcacctgagtcagggaggtggaggttgctgtgaactgtgattgcatcactgcactctagcctgggcaacagcgtgagaccctgtctcaaaaaaaaaaaaaaaaaaaaaaagaggagagatggagtctcactctgtttcctagactggtcttgaactcctggggtcaagcaatcctctcacctcagtctccgaaatagctgggactgcaggcacacaccactatgcccagctcttctagatgatctttttttgttgttgttgtttttttttttggagacaaagtcgcgttctgtagcccaggctggagtgcagtggcatgttctcagctcactgcaacctccacctcctgggttcaagtgattctcctgcctcagcctcccaagtagctgggactacaggcgtgtgccaccatgcccagctttttttttttttttttgtattattagtagagacggggttttaccgtgttggccagactggtctcgaactcctgacctcgtgatccactcgcctcagccttccaaagtgctggaattacaggcatgagccaccccacccagcctagatgatctctttttttttttttgagacggagtctcactctgttgcccaggctgaagtgcagtggcgcaatctcgcctcactgcaagctccgcctcccaggttgacgccattctcctgcttcaaacccccgggtagctgggactacaggcacctgccaccacgcccggctaattgtttgtatttttagtagagacagggtttcaccatgttagccaggatggtctcgctctcctgacctcgtgatccgcccgcctcggcctcccagagtgctgggattacaggcgtgagccaccgcgcccggccctagatgatctcttttaagtagatactcattgttatgatttctgtcctcctcttttctgggccacagggggcccaggaggaagtgtacaaaccatgtcatggcagccttccctgtgggctccagtgaagttgctcatgtgtcttggcccttggtgactggtctctgatgccgtactaatggtcagtggacctgtgatctgttcttggggtacaggaaatgcatgaggtgtgcccagtgggtgtgatcatggccctgcagacagggcagctcctgcctcttctctccctgttgctgtctgtcacccaacaccagccagcctgttacctctgatatgggcgccctcactcctggactctgacagctcccttgcaggcacactgccaaagggtcagtcgaaacttctggattcttccatcctcagggaatggatagcatgccactgttgcccttctctgcctgagcaatctatattgctgtgtctgctcttctctgtgccccacgttgatgcagagctcccatgaagtctcccagagggtgagtgggaagttggcacaccccctcagtttggacattcccattgcctctctagtcactgtcactgtcctgcatgttcctgggatgggggagtagaccaggcagaaccttcagccctgtctcattacttgggctctccccaccgaaccgctgtcagcatctgaagggctttgtcttgcccgtgacaaggacttcacttcaaatcccccattcctttctcactctgcctcctaagaattctatgttcagacccttaagctgctggaaattataagacttcttctccactaacaaaggcacgtttattatctcactgtggacttgataccagaatctagcatgaagctcctagttcagcagggacttcctggtgttcaccccattctcacccctgcacttctacaatgatggccatggattcagtgggtggggatgtgaagcaacatgattttcaaacaagggaaacttctgctcatctcaaaattatcatttgatcagtggaaggttgtgtaattgatacctatctcccctgcctaaatgtaataggattaaattctggttactattaatgttcagcaagcccaagtcctttttgggatcggtaagacaccttagttgtacttacaacccttaatgcagagattctcatctttggctgtactttggagtctttctggtagctttgaagaagtgctgaggcctgggactcaccataagagtgatttaattggtttggaatgtggcctggtgttttagcccctaaagcaagcttgtccaacctgtggcctgtgggctacatgtggcccaggacagctttgaatgtggcccaacacaaatttgtaaactttcttaaaacattatgagatttgttgttgttgttgtttgtttgtttgtttgagctcattggctagtgttagtgtattttatgtggagccaagaccgctcttccagtgttgcccagggaagccaaaaggttagacagtcctggactaaagcttcccacatgatcataatgttcaggcaaagcagagatccttaaactagctaccagctaagtaaagaagccattcacttgggtttagaagtcatgtactaaattgtatcttcaaatggacatgcgcttctttgattactattgctattttgaattactgcagtttgaatgttattttattattttttttcagacagggtttcactctgtcacccaggctggagtgcagtgacgtgatcatggcccactgcagccttgacccccaggctcaggcggtcctctcacctcagcctcaggagtagtggggaccataagcttgcaccaccacaccggccaattatttaaaacatgtttgatagagacagggcctccatgtgttgcccaggctggttttgaactcctgggctcaagtgatccttctgccttgacttcccaaagtgctggcattacaggcgtgagccaccatacccggccaagtgttatatatttttttaatcaaaatacttttctttaaatatagatttttttcaagtttgtggaaacctgattgagtttcattgctttcacagcatctacttgtacataatggtagcatttgactcagttagaaatttttactgaggcaaaatttcttgcattaagacagtggctatattggcattcgctagtgcagctgccctccagctcagctgcgcattagaatcaccttggccacttttattttatttttatttatttatttatttcgagatggagtttcgctgttgttgctcaggctggagtgcagtggcatgatctcggctcactgcaacttccgcctcttgggttcaagtgattctcctgccttggctgccattgtagctgggattacaggcaccggccacactatgcctggctaattttttgtatttttagtagagtcagggtttcaccatgttggccaggcaggtctcaaactcctgacctcaggtgatccacccgcctcggcctcccaaagtgttgggattataggcgtgaaccactgcgcctggccaccttggcaacttttaaacgttccatagcctaggttttatcccagaccaattatgtcaaactgtctgtggctgggactctgccatcagcatatttgaaaattccccaggggactgcaacgtgccaccaagtttgaaaatgaataacctggagacatttatgtgatatgtatcacctggaaatcttgtctatacgcagattctctgatgaagaaggactgggatgggctccaaatcctgcatttctaactagctctcacatgacagcaataagagagcaatggtgctgacctgcagcaacagctcacttaagtggcaaggacctagaaagcttaaaaagcctgggtcctgttactaatgaatttaatttgatggcactgagtagggtccagaatttgacaattttgaaaagctccccaggtgactattatattgaatcccgggttgggaaccccgtcatgctacgggccagctatgcctcttgttatataaatggttaattaatggcatcaggtgaagggggaagggagacgacaaaaacaaggccaggtgggggcccccctctgggatggcatatctaaaaaaggtccctctttagagagaactcaccataaggctaccagattttttcaacgcatcttaagcccctgctttgcatattttttgaatacagttacatattgactatctagaggccctaattccaaatatgtaagataaaataaaacaagttccatcttgtcacctgctgcaattgtattcatacgctgtagacagtgctgaatacaactcaagcacagaacagattttggaacagctggggatgggggaaggagaggactcaccagcaggaagggaggagggaggcgtggtaaagccttccttctccggaacggtgactgccgtgactgggcttctgccacctgcccagtgacagcccccctccagaccacagagtctgcaacagaacctgaagccccaatcctccttatacgtttcttctttacattatttcaaacagttttgttgcctttgatcttttcccctagagcttgctcagtgctggccttgtgctgtcctgcctctgattcacaggctgttctttggggtgtccctctctgaacctctggggatgcccttttttgtgccacctcctgactgtgcttagcacagtgcagctcagggccactggatacagctgtgcagggtgtgccctagagagggcacctggtgaggggcacaagaggggctgggccagtcatgctctacactgtgctgcagcaggagctagagttgcctttctgctcttccatttgctggaaagcactaaggggcacctttttccagtttgcatgtaagtgctgccttgtgtgctagtggaggcccagagcaggtcacccattggtgcttactaagtgctcactgaatgaatgaatgcatgaacaaaataacaaaatagaggcaataaagataaataagaagctttcatagtcatttaggtcaagtttaaggaagccctaaactagaatgtaaatgtgtgatggaaagcaggggataaacagaggagcagaagcaacaggtggtggattggattaaggttcaaggatggcaaaggagagagggaataaaaattatctcctacctgtagtcaccagtaatgcttgactcttccacaagaagaacagggacagtggggtgcgggtgagttctacgcacccaagtctggagaggtggctttggtgaggcaacaagttaacaggagtgatgcacctctgatgtcaggccctgaaacaagcagtgcagagagatgtgagaccacccccaccccctcagagagctcatgctctaggtaaggataccagacacagaatttctggtgctgggctgtgtcaaccagcagcacccatgggtgacaagtgacagttaataatactatagtagctgtatctacctactacttgttttactcttcgggatgagctttcatctgtgagaagtagctgttatgttgcttctcattgaagaagacattgatgcttcctaccccatctcctgactgccagtcaaaacattaggttgaatcatataaaattaccattttgtaggtcaaaaatggtcaaatatcagcaatttcatatagttcagcttaatacattccactatttttgctgtttgagaccttttaaatgcttttattggcttaagtcaattataaaaggagatttttgattaccggttcaatctccttactagtcagactcgctatttatctaggttattcagattttctgtttcttcacagtttagtcttggaatttgtccatttcatctaggttattcaattggttggcatacaattgttcatagtactgtcttatgatcttttatttccatagaatcagtagtaatatccccatttccattgctgattttagtaatttgagtcttcttttttcttagcctactagctaaaagtttgtcagttttgttgatcttttaaaaaaatcaactcttcatttcattgattttctctgttgcttttctgttctcaacttcattatcactgctcttatatggcttttataattgcctatgcatttacctttactaagatgtttatttcttcatgtgggtccaagttactgaccagcattttttcatttcatgttttcatatacctttgggccttcatttcactctgcacctaagcatttcttgcagggcagctctactggtgacaaactcccttggctttttaaaatctgggaatgtctgaatttctccctcactttgaaggacagtttttccagacataggattcctagctgacaggtcttttccttttagcactttgaatatattggcccattgccttttggcttccaaagtttctgatgaaaaatctgctgatcatcttactgaagataccttgtatgtgatgatttgtatctctcttgctattttgaaaattctttccttttttattgataagagatatacatagtttcaggatacatgtgataatttaatacagtcatataatttgtaaagatcaaagcaccatactcaggatatctgtcactttaaatatttgtctattctttatgctagaaccatttcagttcttttcttctagctatttggaaatatacaatagattattgtaaactacagtcaccctactgatctgtttaacactaggtcttacttctttatcaaaccatatatttatacccataatcaacttctcttcatacccacttttcctctacccttctcagcctctggtaaccgttaatattttctgtctttgggggctggatgcagtggctcatgcctgtaatcccagcactttgggaggccgaggcaggcagatcacgagatcaggagatcaagaccatcctggctaacacagtgaaaccccatctctactaaaaatacaaaaaattagccgggcgtggtggcgggtgcctgtagtcccagctacttgggaggctgaggcaggagaatggcgtgaaccggggaggcggagcttgcagtgagccaagatcgtgccactccactccagcctaggcgacagagtgagacgccaactcaagaaaaaaatatatattttctatcttcacaagatttgtatttttagctcccacatatgagtgacaacatgcaatatttgtctttcagtgcttggcttatttcacttaacgtaatgacctccagtacaatccatgttgctgcaaatgacaggatttcattcttttttatggcaaattttacacacacacattcacgtaacagtttctttatgcattgatagacactttgattggttccatattttggctattatgaatagggtagcagtgaacataggagtgaacatactcattttgatatattcatttcctttcttttggatatatactgagtagtagaattgctggatcacagcacagttctctttttagtttctttgaggaacctcaatactgttctccatagtggctatactaatttacattttcatcaacagtgtacaagggttcccttttctccacatcctcaccagcactcgttactgaccatcttttggatcaaagctgtttcaactggggtgagatgatatcttattgtagttttgatttgcattcctctgatgactagtgatgttaccattttttcatatacttggccatttgtatgtcttcatttcagaaatatctgttcagaccttttgtctgtttttaaattggattttttgttttttgctgttcagttgtttgagctccttatatattctggttattaatttcttgtcagatgggtagtttctaaatattttctctcattcagcagattgtctcatcattttttttattgtttcctttgctgcgcagaagttttttttagcttgatgtaatcccatttgtcttttttgctttggttgcctgtgcttttggggtcttacacaaaaatttttggccagaccaatgtcctggagcatttccccagtgttttttttctagtagtttcaaagtttcaggtcttagatttaagtctttgatccatttttacttgatttttgtgtatggtgagagataggggtctagtttcattcttctgaatgtatttatccagctttcccagcaccactgaagagacagttctttcctcactgcatgtttgtggagactttgtcaaagatgagttgctcataaatgcgtggatttatatttgggttctccattctgttccactggtctatgtgcctgtgtctgtttttatgcgggtaccatgctgatttggttataataactttgtagtaaattttgaagtcaggtagtgtgatgcttccagctttgtttgttttgttcaggattgctttgactattcagagtctcttgtggttccatataaattttagaacatttttccttttctatgaagaatatcattggtactttgatagggattgcattgaatttgtaaactgctttaagtagtcttgtcattttaatgatattaaagctgtgaacatagattagaatatctttccattttttgatgtgtcctccaaaatttctttcattggtgttttatagttttccttgtagagagatcttttatttatttggttaaatttggttgctaggtttttaatattatttatagctattataaatagaattgctttcttgatatctttttcatattgttcactgctggtgaatataaatgctgctgatttctgtatgttgattttgtattttgcaactttactgaattagttcatcagttctaacagctgtttggtggaatctctgtttttctaagtataagatcatgttatctgtgaacaaggctaatttgacttcttcttttccagtttggataccctttatttttttctcttgcctaattgctctggtcaggatcttctagtattatattaaatacaagtggcaaaagtgggtatccctatcttgttctagatcttagaggaaagtccttaatttctccctgttcaggatgatgttagctatgggtttgtcatatatgacccctatattttgaggtatgttcttcttatatctggtttgatgagggttttgatcataaagcgatgctgaattttatcaaatgcttttttggcatccattgaaataatcatatagtctttgttcttggttctgttaatgtgatgtatcatgtttatttatttgcatatgttggatcatcctcgcatccctgggattaatctcacttgatcatggtgcatgatctttttattctttttttttttttttttttttactagacagagtcttgctcttgttgcccaggctgtagtgcagtggcacgatctcggctcactgcaacctccgcctcccgagttcaagcgattctcctgcctaagcctcccgaatagctgggattacaggcagatgccaccacgcccggctaatttttgtattttcagtagagacggagtttcatcatgttggctaggttggtctcaaactcccgacctcatgatctgcccgccttagcctcccaaagtgctgggattacaggcgtgagccaccgcacccggccgatcatggtgaatgatctttttaatgtgttgttgaagtcagttggctagtattttgatgagaatttttgcatctgtgttcatcatcttagttttccttttttcgtcatgtccttctctggttttggtatcagggtaatgctggcctcatagaattagcttgggagtattggagtattcattcctcttcaaaaaaaaaaatttttttttgagacagggtcttgccctgtcacccaggctggagtgcagcagtgcagtcacagctcggtgcagtcacagctcactgcagccttgatctgctaggctcaagggattctctgcctcagccacccaagtagctaggactacagatgtgtaccaccatgcctggctaattttttttttcttttcttttgggtagagacatggttttgccatgttgcccaggctggctcttcagtttttttgaagaatttgcgtaaaattgatatttgttatttaaatgtttggtaggatgcggcaataaagccattaggccatgtggggatttctttcatgggagactttattatggcttcagtatcactactcgttattggtttattgagttttcctatttcttcatggttcaatcttggtagatgtatatgtctaggaatttatccatttcttctaggttttccagttttgttggcatgtagttgttcatagtagtctctaatgattctttgtatttccgtggtctcaattgttatgtctcctttttcatttctaaagttatttatttgggtcttccctctttttcttttttctcggtctaaccaagggcttgtcaatttttgtatcttatctttttttattttgtgagacagcatcttaatctgttgcccaggctagagtgcagtgaaatgatcatgggtcactacaaccctgaactcgtgggctgaagcaatcctcctcctgcctcagcctcccaagtatctgggtactataggcatgcaccaccatgcctggctaattttttttttttttttaaagatggggtctcacaggtctcgctatgttgtccaggcttgccatgaactcctgcctcaggcaatcctgctgcctcgacctcccaaagtgctaaaattgtaggtgtgagccaccatgcccaacccttgtatttatatttaatttaccaatgggttttatacctttaaatgtttttcttttctttttttttttctttttgcactttagtgtttttttcttgcagattgaataactcaatatttagtgtttcttgtaagatggtggtgaattctccctgctttcatttgcctgggaaaaacatatttgaaggataactttgctgaatacaatatttttggatggcagttttttcagcactttaaaaatgtcattctgctgcttccccctggcctgtatggtgtccattgagaactgccagacacattggagtgcctttatatgttatttgctgattttctcttgctgcttttaggattctgtttgtccttgacctttgagagtctgattattatatgtcttgaggtagtcttatttgggtcaaatctgtttggtgttctctaaccttcctatacctggatatttatatctttctcaagttttggaaagttttttgtttctctttttttttgaataagctttctaccccttgcacttgctcaactccctattgaacctcaataattcttaaattttgtcttttttctttcctccctgtgtcacccaggctggaatgcagtggtgtaatcacaacttactgcagcctcaacctcctaggctcaagcaaatcctccctctcagcctcccgagtaactgggacaacaggcacgtgccacaatgccaggctaattttttgtattttttctagagacagggttttgccatgttgcgcagactggtcttaaactcctgggttcaagcaatccacccgccttggccttccaaagtacggggattacaggcatgagccactgcaccaagtcgagtctttttttttttttttttttaaagacaggttctcattctgtcccctgggctagagtgcagtggtgtgatcaaagctcactgcagtctcgaactcctgggttcaagcagtcctcccacctcagcctcctgcatggctggaactacaggcatgcaccacaatgccctgctagtgtttttattttttgtagagaggggggtctcactatgttgcccaggctagtctcgaactcctgccttcaagtgatcctcctgcttcagcctcccaaagtgctgggattacaggcatgagccaactcatttggcaaatttggtcttttgaggtaattttctgtatcttgtaggcaatctttgttgattctcattttttaaagatttttttctcctttatgtattttcaagtagcctatctttaggctcaatgattcttacctctgcttgatccattcttctttggaaagcctctaaggaattcttcagctctgcaaacatatttctccattctaagatttctgcttgatttctttttattatttcaacctctttgctaagtttatttgataaatttctgaactgcttttctgtggtatcttaaagatcactgagtttccttagaacttctattctgaattcttggttagagagcttacatatcatcctctcatttagagtgagttgctggttccttgctatgtccctttggggagatcatgattccctgtttgctgttgtttcctgttgatgtgtatgtctttgcattgaaggattattcatttaatctagtcttctctggctggcttgtttttgtattttattggatacatttgcttagaggctttttgctgctgggtcactgcctcctttttagctctaggtggagccttaaacccaggttcacctcagctcttagtaaactatcagaacgctgctcttcctgaatgggggaggtccccaggggattttcttggcagggtgggaaggctggctaggggtccatgcccaggggatctgtgggacaaacctcctatagtgtggtactgctaaacagccactctgatttggcatctccttttgctgagttacacaacagagattccagagctggggatggtagtcccacctccctgctttgcctctgtctgtcctcagggatatttctcccttcaggcacttgcgatgcttcccatggattaaggcagagcaggcctcctgccagggaacccaagatggtagagaagctgaatgtccacctcaattgcactttttccagtgtagaaaccttgagttggaggaaatgtttttgcatgcctggtgatcggcataatgtggggaatgttgttatggatgtagaaatccaattgtcttaccatctgctcagggttttttctggggtcctgggaactgtctcatcttcatatttgagttctgaggtccttctggtgataatttcagcactgtatatttgtttttatttttctgttggggaggggtgggtactaaagccagcttacttctatgccaccatttcagaactggaagtctttcacttttgaaagtttgattttagtgtgtctagatgtgggtgtctttgagttcatcttacttggagttcatttaacttcttggatgtttgtattcaagtctttcaccaaatttggagagttttcagccattatcttttcaaaatactcttgctacccttttctctctccttatccttctggaattcccacagtgtgtgtgtgtgtctgcctgatggtgtcccacaggtcctttaggctctattcacttctcttcagtcttttttctgatcctcagacttgataatttccattgtcctctcttcaagtttgctaattctttcttctgcctgccaaatctgcctttgaatccctctagtgaatttttcatttcaattattgtacttttcagttctggggtttgtggtatctttttaagttttctatctctttactggtatttccattttgttcatacgtcattatcttgatgtccttcacttcttcctttagttctttgagcatctttaagacagttgttttaaagtctttgccatcaggtctctttcagggaccgtttctgttgacttatttttcttcctttgactgggccatattttcatctttcttcatatgtcttgtgatttttttgttgttgaaaagtgaatgtttgaatctaacagtgtggtatctagaaatcagattctccccctcccctgggctcactgtttttgtttacttatttgatggttgtatactgtgtgtatgctgaggaaaatataagcctgaggtataaatgtaaggtctcctcaagtcttttctttttcttttttttttttttttttttgagcagagtcttgctctgtcacccaggctggagtgcaaacggtgctatctcagctcactgcagcctacacttcccgagttcaagcaactctcctgcctcagcctccagagtagctgggattacaggcacctgccaccacaccccgctgatttttgaatttttagtagagatggggtttcaccatgttgcctaggctggtctcaaactcctgatctcgtgatctgcccacctcagcctcccaaagtgctgggattacaggtgtgagccactgcgcccgacctcttttttttttttttttttttttttttttttttttaaagacagaatctcactgtgtcacccaggctggagtgcagtggtgcaatctcagctcactgcaacctccgcctcccaggttcaagcaattcttgtgcctcagccacccaagtagctgggattacaggcatgtgccaccacacctggctaattttttgtatttttagtagagacattgtttcaccatgttggctaggctggtatcaaactctgacctcgggtgattccccctgcctcggcctcccaaagtgctaggattacaggtgtgagctagcactcccagcttctcaggtcttttctgagcctttctctgggcatccatggtcatttctattttcccctatatatatgtgtttgtttttgaatgtcctagtctttaatgtctggcttctaaaagggaaaaaagcaaaaaattaatgggggaggtgctggccctttaaattacctggaggtcacttcagcccaagggagaggggcttgcaacattggagggacatacaataacagtggctctcagcctctttgtctgcacttctgtgattagaaccagcaatcagtgatcagagcacagatccttgatatttggagggtcagggtctttgtttctgcctaccctggctccctcaagctatgtgcaggttgctccaggaacatgggcacagctgcctaccatgtgactgagaggtgggggatgggtagctgctgctctgctaagagctgaagttgaccaaaattaactactatttaatatccaagccttccccgagaagttgcaagccttcaatagattccaagtggtttcaaaatagttacagcaggaagattttgctaatgcagttgtctgggtggggaagattgctggtgctttctactccaccatcttccccctctcttagattttcacatgtgtggttacattaaatcctgatgagcagagaatttgccccaaacatttcttggtatttttagggaaatgtatatgttgcaaattctagtctccagtgtgaatgataagtaaaatgtggttgttgctgttacatcattatgttttttccctgtttttagataaaccagatattttcaatcaatgaaaaacgatgacagatatttcaggcagtcttcaattagctggcaataatatgttttatattaaatgaaatgtttcgtaagccatgtacacttttaaaatccatctctatctcaccatacctcacatgatacagtgcttatgttgtggcaaaataagacccagactcaagttttagaattccttaaggtaaggtcggctacaagaaggaatgagggcccccacacaaacttgcaaggccccaaaagacagtgatttttcttgagatacattaagtcacaagcacactaatcatggtgaaatgttacaaccgtgcaaagtatttgatagtgttaactactgatgtccagggttttcatgaagatatagctgacatatatattttttaagatcatgctatttatctagggagagtaaaacatcagtttgccagggttttaacttttctttctttttcttttctttctttttttttttttttttgagatggagtctcgctcttgtcgcccaggcaggagtgcagtggcgcgatctcagctcactgctcactgcaacctccacctcccgggttcaagggattctcgctactcagccgcccaagtagctggaattacaggcgcccgcgactgtgcccggctgatatttgtatttttagtagagacagggtttcaccatattggccaggctggtctcgaactctttttttgtttgtttgttttttgagacggagtctcgctctgtcacccagggtagagtacagtggcgcaatcttggctcactgcaagctccgcctcccgggttcacgccattctcctgcctcagcctcccgagcagctgggactacaggcgcccgccaccacgcctggctagttttttgtatttttagtagagacggggtttcactgtgttagcgaggatattctggatctcctgacctcatgatccgcccgtctcggcctcccaaagtgctaggattacaggcgtgagccaccgcgcccggtctggtctcaaactctctacctcagatgatccaccctcctcggcctcccaaagtgttgggattacaggagtgagccactgcgcccggccgggttttaacttttcttaactggcagttattttttttgagacagagtcttgctctattgccaggctggagtgcagtggtgcgatctccgctcactgcaatctccacctcctgggttcaagcgattctcctgcctcagcctcccaagtggttgagattacaggtgtgtgccaccacacccagctaatttttgtgtttttagtagagatggtgtttcaccatgttggccaggatagtctccatctcctgacctcatgatccacccgccttggcctcccaaagtgccaggattacaggcgtaagccaccacgcggggccctttttttttttttttttttttttttttttttgaggcaaggtattgctctgttgctcaggctggagtgcagctttgcgatcacagctcattgcaacctcatcgaccttctgggcttaatcaatcctcccacctcagcctcctgagtagctgtgactacaggcatatgcactatgcctggctaatttttgctttttgagtttttttcctgatagagccgagattttgctatgttgcccaggctgatctcaaactctgggctcaagtgatctgcctgccttggcttcccaaagtattggaattagaggcgtgggccaccacacatggcctaaggcctaattggcagtcttcatgacatagaacttcatctcttatgggcagggttggcttcatggacatgtaatttgtgctcttagacatacctagtgctgatataatattcttctgttgccattgtgaagttcttaataaattataaacaaagacctctgcattttcattttcaccgggccccgcaaattgtatcgctcgtcctgattatgggagctgatttcatcttcctttaccatatcgtatgagctaaagcatggttttcacgggataaactatggaacaggcaagggtggtggtaagccaaaggagcttctggccaacactttttatttctaccagagactgaacttggtatgataggcaagggaaagaaagagcatagtttagaagcaggcaggggctactgacagctagagattctccattaataacaacagcagctgctggtactcctgctacacccacgaccatttcaagtagctaaaatatctgccaggctctggctaagtgcttcatgttcattatttcctttaacttaatcttctcaacaacctacaaattgagtattatttttatagatgaagaatccaaagttaccagtaattaagttgcctacaattatagaggcattcactgtccttcctactcacttaaaaagaaccagtctatcttgtcttgttaaaattggatgtgaatcaccaattttcaccctttaaaagatgtattggcagggcaagggccatagacttcgttagttttttttttctacttttttacttttaggtataattgtagatagtattgttgtttagtaccttttggatagatattttctttcctttttctccatagatgctatctagacagtataacaatactggaagtgttttccaagaagaaatacatacaccctcctctttgtctcagaagatgtcagtaaacagtcctatctattttttaaacctcagccaaaataacatttagttcattgattatctctgctattattgttttcttagtttttatgtgtgattgtattctaccataattttaaaagattatccagctaggcatggtggctcatgcctataatcccagcattttgggagcccaaggcagatggatcccttgagcctaggagttcaagaccagcctgggcaacatgacgaaatcccatctctacaaaaaatacaaaaaattagccaggcatggtggcacacacctgtagtcccaactactggggaggctgaggtgggaggatcacctgagcctggaggtggaggttgcagtgagccgagatcacaccactgcacttcaaactgggcgacagagcaagaccctgtctcaaaaaaataaaaataaaaaaagattatccatgtgttctattttaattttgcattaaaatatagtttttcacaagtttataaatacagaaatctcattctggactaaccccaatcacgtgtcttgcaggaaagcgtctctagcagctgatatccccagacttggatatagttcctcatcccatcacaagtacatcccccggagggcagtgctttatgtacctggaaatgatgaaaagaaaataaagaagattccatccctgaatgtagattgtgcagtgctcgactgtgaggatggagtggctgcaaacaaaaaggtaatggcatgattttagtatgagaaaaagaaaggtattgaaatttgcttctcttccgaatagtgacattgcccgctatttggaaagattctaccacactcatcttttgctgattattaacaattctttgatctgcttttatataggttctaaatgtgtatctcttttctctgagagaaaggaagaatcccaccaaaatatattttaaaatcacgaccttcagtagatgagactatgtgtatgtatagataaaaagatggacaatcaattttggccatgatgtttgccggtctaggtaaatgagtgacatcaggggtccccaatccccaggccatggaccagtacaggccacaatacaggcctgttaggaactgggccagaacccaggagatgagcagtgggtgaacaagcattatggcctaagctctgcctcctgtcagatcagcagtggcattagattctcaaggagcacgaccctgttgtgaactgcgcacgtgaaggatctaggttgcacgctccttgtaagaatctaactaatgcctgatgatctgaggtggaacagtttcatccgaaaccattgcgccgccccacctcccatggaataattaccctccacaaaacaggtccctggtgccaaaaaggttggggaccactgaattagataattctaaaattgtggtgtaagattttcagactgataaaatgcaactaggaagttctttcttcttcttaccaccaggtatactgagtaatggtcttttctcttctgggatacgtgtcaagagaataaaacatagtttttcatggataaatcaccattttctctacttaatttaagggaaatgacacatagaaccttagtggttggctgtagcttctggcttatttcctcatggcctgaccaaagagatgagccttagaaaatatccaacttgtaggccggatgaggtggctcatgcctataatcccagcactttaggaggccaagataggagcatcacttgagctcaggagtttgagaccagtctggccaacatagcaaaaccccatttctaccaaaaaaaaaaaaaaatttagccaggtgtggcggcgtgtacctgtagtcccagctactcaggaggctgaggtggtagaatcacgtgagcccgagagtttgaggctgcagtgaaccatgatcgtgccactgcactccagcttgggcaacagagtgagaccctgtctccaaaaaagttttaaaaaaacaaaataaccaatttgtaaataggtacaaaagactcttactgcgtgactgtatagtagttgctttttattttgttttgctcaactttgttttctatgtttttctaatgaacatggattcattcaatgattagttgagatatataaatcattataacaataacttacatttgcatggaacttttaaagttaaaaacatgagttcgcttgacctttatctatccaggccctagacaatgaggttgggctgggaatgggtcgtggggcgggggatgagggagctggctctctggatttatgcctacttgaaagtttcttgcgccaggtgacctgaaacaacgtggctgtactatacaattttctggattaattgctttttctggagtttctagcaaatatttgccttaattttaaagaaaaaatttaatttccagtatcttcctaatggtcaaactaaggctttccaagtatttggaaaaggattagaatgagcctgtggaatctaaaatgtctactcaacatctttggcatgtgccaaggaaaatactattaatccttctcccagagattaaagtaaataggcctttttctgaaggctgtaatatgatttcagtatgctccttcccataactcatgtagtgcactccaagattcgatgctaacttgtaattccagttctgtgtgacccagggcaattcactttacttctttgcctcaatttcttatctgtactgtagggatgacaatatcttcttttgtcagggacagggtttattatgagaaaaaagttgataaagtacctgggagtagcttgatttcctataggaaatagataaatcctgtagtaatcatgattagaggggaatttattgtagcattgtagcacagtgagccattaggtgccctgataaacttctaattatagttcttcacaaatcttgaggttgtcctccaatacccacctgagaatgttttctgccactcaaatgagttggaaatatagtctatttctgctttacatttccttattgtttatctgggttccgaagccatccttatctccatagtagtagcagctgtgctaccacttaggggaaacctgaggaggagaagggaaagaagagttaatgattgcccaccatcttgaagtacatatgtccacatcgagtctttactaggacattttcattctcctaatgcagctggacattgcaatgtgctagacatactgttttaggcatcctaagctcagagtcagctaaaatttcattaaaaaaattttttttggtcgttgtgttgcccaggctggggtgcagtggtgtcatcatagctcactgcagcctccaactcctgggctcaagcagtcctcccacctcagcttcctaagcagctgggactatacgcacctaccaccatacccagctaattgttttattttttgtagagatagggtcttgctgtgttgcccaggctgttcttgaactcttggactcacgtgatcctcctgcctcagcctcccaaagggctgggattacaggcataagccatgatgcccggccaaaattctctttttcatccatagaaacttctggaaagccaagctggtctttgtttaaaataataataacaataggccgggcacggtggctcacacctgtaatcccagcactttgggaggctgaggtgggcagatcacaaggtcaggagatcaagaccatcctggctaacatggtgaaaccccatctctactaaaaaatacaaaaaattagctgggcgtggtggcgggcgcctgcagtcccagctactcgggaggctgaggcaggagaatggtgtgaacccaggaggcagagcttgcagtgagccgagatcgtgccactgcactccagcctgggtgacagagcaagactccatctcaaaaaaaaaaaaccaaaaaacaaataataataataataataataatcttggccgggtgcagtggctcacatcagtattcccagcactctgggaggccgaggcaggcggatcacttgaggccagtagttcaagaccagcctgggcaacatggcaaaacctcatctctactaaaaatacaaaaaatcagccaggagtggtggcacacacctgtaatcccagctactcgggaatctgaggcacgagaatcacttgaacctgggaggcagaggttgtagtgagccgagattgccccactgcacttcagcctgggtgacagagcaggactctgtctcaaaaaaaaaaagttgtttttttttttttcttaaaatctctatctaggacttaattttatctgacatatttcacatcatagccctagcctgtcaaggtctttttggattttgatttcattatccaacatttatattatctgagaatttgacatgcacatcatatgaaaatttaacaagtttcagggaaattttgaagaggttggggccaagtgctgcacaagcatgccgctaaaaacttcttttccggtttattgaacagagacgtatatagtgctgacgatatgctgggcgctgtaatttgcatgacaagccattgaggtgctatgattacattcattttacaagtaaggaaattgaagcacagagatatccagttcatgcacgtttttttttttcatagatagagttttgctattgttgcccaggctggagtgcagtggtgcgatctcggctcactcactgcaatctccgcctcctgggttcaagtgattctgctgcctcagcctcccaagtagctgggattacaggtgtgtaccaccgtggctggctaattttgtgtttttaggagagatggggttttaccatgttggccagactagtctccaactcctgacctcaggtgatctgcccacctccgcctcccaaagtgctgggattacaggccaccgcacccagcccccacgcccaacccagttcgtgaattataccatgaatgtgcttattcagaaacctaactctcctaaaatccaatcttttcacgcagatattatgatattttcatcaaatgccttttcaaaatgaagatatgttcccaatctacttgtccaaaaataccttctccctcaatacctccacctaaccagcaaagtgaggtcaggtaaatgagacttgttcttgaggaaacccaagtcagtacctcattgctaccacctctttgtaaactgttggaaatacaaaaatgctgtactgagaattttctttcttccttttcttttcttttctttttttttttttgagacagagttttgctcttgttgcccaggctagagtgcaatggtgtgatctcagcttaatgcaacctccgcctctcgggttcaagagattctcctttctcagcctcccgagtagctgggattacaggcgcatgccaccacgcctggctaatttttgtaattttagtagagacggggtttcatcatattggtcaggctggtctcgaactcctgacctcaggtgatctgcccacctcagcctcccaaagtgctgggattacaggcgtgagcctgagaattttctgttacaagtgctgtattacatatattgttatttacataccttatcccatttacatatgttatcttaatccttatagcaatgttttgaaatatgtacaaggtcacattgccattaaatagcagaaccaagatttgagtctcctagaatttttgccaggaaccagcctccagctcacctgctcgtgtatgtcctaacccacgtttttcgtctttcttggaaagtgagtgccttggcttctttttatctttagtcagcttcctgttctccattatctctccaaggtaactgacaggagctctgtgttcccatctgcagactctttcagtgttctgggactgggattatcatccatttagacctaggagcttcaattcactggaaagtccagataagcctgaaacttctcaaatatctcatattctcttttctttctcaaagtcacctcttaatcatgtttcttatttgaatattattctcttgatggaggacatagagaccatttttagtgagtttatttctcagtaagaagaaatccatattaaaactcttaatttcagattatctagttagagtctggctaaactgaatcattattgcctaattcagctttcttggcattattaaaatgtcacttcattttatatctcatttttttattaatagactaattccatatttcatttgattgactctctgtgaagtatgggcttataatgaaaacaataggagtttccacaaagcagtttataagtatataataccttccagcaggctctaatcctgtcctgctaatccaatttgtgtttaagtagctccttcatgtcaaggatggcactaccagctcaccttcccaagcacggatgataaaaaagactgcctccactccctcttatctcctccttttcattgttaaatgcatgaggaggtgtggggctgtctaagccactgcttgctgggccacagtaaaaatatgccaagtaatgcaccgatttctgatgtaactccatgacactgggtgaggccaagaaagtaggcactgaggaggaagaggcatgattccatagctgccatttcagttgaatggatatttaaacaattctttaaatttatttactatttaagtatttaagtatttaaatgtaaatactaatcaatacttaaataaatactgagtacctactcaactagttgccatggcaggcaggagggagacaaaaatggtggcagatccccaacctggaggagacacaagctgttgttgagagtggcaaaaagtaaatagctatgatccaacaaaataggtctatgagaacatatttcttttttaatcatttggttctgagtggggttttttgtttttgtttttttgagaaggagtctcgctgttgtcgcccgggctggagtgcaatggtatgatctcggctcactgcaacctctgcctcctgtgttccagcaattctcctgcctcagcctcccaagtagctgggattacaggcgcctgccaccacgcccagttaatttttgtatttttagtagaaatggggtttcaccacgttggccaggctggtctcaaactcctgacctcaggtgatcctgcctcggcctcccaaagtgcagggattacaggcgcgagccaccgtgcctggccagttctgagtattttttaattgtcatttatttggtctcttgcttgaaatataacatacaaaagagtgcttcccaaagtctatgatgaagaaccagtttagttatccaatccattgtggactgatacttttgtaaaatacaatacaaatgaattgctataaaaattaaatgctggttgggtgacagcaatgtcaggtgctacagaagtttctaaactgttactctccaaggttgcacttaatcatagtggcatggtaaagtttcagggactgagactgggccacaaaccatagcttgagtagcaaggacttaaatttccaagtgtaggagagttttttgttttttgtttttttcaatttatctttttgttgctgagctctagcgtagtgacatggtgggtggttagagaaatgtgatgtgaatggtgatgattctttgaaatttgtcattctgcttcatgaccaactacattagccattttttgtaactgttccatgtgctgaagaagaaagtatattttctacttactagatgcagagttctatatattttctattagaccaagcctgttaattatgttattcaaatatacaaatctttaccgacttctatctgcttgatgtgtcaaaaattgagagagtctagttgaaatctattctccaatagaaaatttgccaatgtctttaggtatatacacatttagaattactacatattcctggcatattgattcatctatttctatgtactgaccatctttatcccttataatgcattttgcttgaatgtttatgtggtctgatcgtaatacagcaacatcaactttccttaggttggcatttgctcagtgtaacattttcatccttttgctttcaaagtgtccatatctttgtattttaattacgtctcctatttttaaaaaatttctatatccatgttgacaatttcactcttttttttgagatggagtctcgctctgtcacccaggctggagtgcagtggcatgatctcggctcactgcaagctctgcctcctgggttcacgccattctgctgcctcggcctcccgagtagctgagactacaggcgcctgccaccacacctggctaattttttgtgtgtttatagcagagatggggtttcaccatgttgatggtccggatctcctgacctcatgatctgcccgtctcggcctcccaaagtgctgggattacaggcatgagccaccatgcccagccgacaatttctcttttaactagaatgttaatccattgtcttttttttttttttttttgaaacgtagtctcactatgttgcacaggctgtagtgcaatggcacgatcttggctcactgcaacctctgcctcccaggtttaagcgattctcctgcctcagcctcccaagtagctgggaatacaggtgcctgccaccacacctggctcatttttgtattattagtagagatggggtttcaccatgttggccagtctggtctcgaactcctgacctcaggcaatccacccgcctcggcctcccaaagtgctgggattacaggcatgagccactgcacccggctaatccattgacttttaatgtaattactgacgagtttcactttaattacaccattatatttcataatgttttcccacctgtttcatgtttcttttttcatctttctttccttttaaaatatatatatatttttaaattttttattatttatttttatttatttatttatttattttgagacggagtctcgctgtgtcacgcaggctggagtgcagtggtgcgatcttggctcactgctagctccgcctcctgtgttcacgccattctcctgcctcagcctcccaagtagctgggactacaggcgcccaccaccatgcccagctaattttttctatttttagtagagatggggtttcactgtgttagccaggatggtctcaatctcctgacctcgtgatctgcccgccttggcctcccaaagtgctgggattacaggcataagccactgcacccagccaaattttttattttttgagactgagttttgctcttgttgcttgttgcccaggctggagtgcagtggcatgatctgggctcactgtaacctctgccccccgggttcaagcagttctcttgcctcagcctcctgggtagctgggattacaagtgcctgccaccacgtctggctaattttttgtctttttagtagagatgggggtttcatcatgttggccaggctgatcttgaactcctgacctcaggtgatccacccgcctcggcctcccaaagttcgaggattacaggtgtgatctaccatggctggccagtttgtttattttcttagttcattctttcctctcttagtttataagttaggactgtgtttgtaatttttattggttactcttgaaattttactaagcacgcttaacaatgcctaaaattaatccatatctttcttctggacagctcaagaaccttggaaaactttaaatccagttatttctctcgcactgtatgcgttatttttgctcaatattttagttatctctctttaatcctatacattttatattattgctatctacagtatttctttatattatcttacatattttcccactttttttttgcttatcatttgttttgtatctcagatcttcctggggtcagttttctttctcttcaggtgcaactttcagaatttccctatagcgaaagttggttgatcataaagtttacatttttgttttttttgaaaatgtctttatggcctgggtgtggtggctcacacctgtaatgccattactttggtaggccaaagcaggcagatcacctgaggtcaggagtttgagatcagcctggccaacatggtgaaaccttatctctactgaaaatataaacattagctgggcgtggtggtgcgcacctgtagtcccaccctcaggaggctaagacaggagaattgcttgaacctcagaggtggaggttgctgcgagccaagatcataccattgcactccagcctgtgtgacagaacgaggctctgtcttggggggaaaaaagtttataataaaaaaaatttcaaaggatgggtaccttgttttggaacagttgactatgttctctagagtgccatcctactgtaaaaatggatacatttcaacaaaagtccttttttttcccttggtatactgaagttttactaaaatgtgacaaagtgtggatttattactctttttctccctcccttcctcccttacatttttgcttcctttttgcttggtataagttgtgtttcctatatttgtagattcatgtcttttatccattttgtaaaatttccattagcaattcacatatggcctctgtttctcctttctattctttccttcagagatgctgagtacacgtagttggaaacttcattctatcctccttctctcttaatatcttctcatattttcttcttgtttctctgtgttacattctcagttagttcttcatgtttaatttccagttttctaattctgtcttcaattgtgtctaatccgtttaacccatcctctgaggttttttgttttttggtttttgttttgctttttttttgagacgaagtcttgctctgtggctcaggctggagtgcagtggcatgatctcggctcactgtaacctccgcctcctgggttcaagcaattctcctgcctaggcctcccaagtagctgggattataagcatgcaccaccacgcccagctgatttttgtatttttagtagagatggggtttcaccatgttggccaggctggtctcaaactcctgagctcaggtgatccacttgcctcggcctcccaaagtactggaatttccggtgtgagccgccatgcctgggccatcctctgagttttttattttaattattatatttgttatatctggaagttctatttggttcttctacatatctgcttggtatattatgaatctgataaattcagtactttggggtgtaattttttttttttgagacggagtgttgctctgtcacccaggccggagtgcagtggtgcgatctcagctcactgcaagcaccgcctcctgggttcatgccattctcctgcctcagcctccagagtaggtgggactacaggcgcctgccaccactcctggctaattttttgtatttttagtttcaccttgttaacgaggatggtcttgatctcctgaccttatgatccgcccgcctcggcctcccaaagtgctgggattacaggcatgagccaccgtgcctggccataaataatttttaatctaaagaagagaaactttgattaaactttgggacacttatttactttccctcatcaacaatcatggattattatgtcatgattatgagtggcaaagtcttatatgcctcaagaaaacataacattattgagtgctatggcattctatagagaacttcaatctttggtcatagcattaagagttcttggtttcatagcctcatgagccctctttgaaataacctatctaaatcattttttgttgtttctgctgactcttacttatggcatgaacccatatgtatattttattcacatcagatctgtaatgtgccaacgttgcagcaagatttgaaggaggtacatctcacacaatagcatgagaagtcaatcatcatgcttgtgaaccacaaaaggatcatgaacccatattcattggaattaattcaatcaattcttagatcccaagagcttagagtgagaaggttttcctccaaagaaaatttgtgtttgctcctactgaaagtcaaagatattactaatgtgggagtctcaatttactctctctaaccttgcagtggtctcaaggcttagtattctgatactaggtctgatataggtatttgattccccgtgtccttatttttctttcacaaatcagaattcaacctattgctttttgttattcctctgcttctggaaaattctctctttttttttttttttttttttttgagatggactctcactttgttgctcagtctggagtgcagtggctcaatcttggctcactgccacctctacctcctgggttcaagcaattctcgtgcctcagcctcccgagtagctaggattacaggtgcccaccaccaggcccagctaatttttgtatttttagtagagacaggtttcaccatgttggccaggctggtcttaaattcctgacctcaggtgatccgcccgccttggcctcccgaagtgctgggattataggcgtaggccaccgtgcccagctgaaaattcttttacattttactgagcccaaaaatgcattaaaaagtacttttgttgaaatgtatctatttttacagtaggatagcacttcagagaacatggtcaaccattccaaaacaaggtacccatcctttgacatttttttttgattttccgagacaagagtcttactctgtcgcccaggcttggggtgcaatggtgcgatctctgctcactgcgacctccgcctctctggttcaagtgattctcctgtcctcagcctcctgagtagctgggactgcagatgtgcaccaccacacctggctaatttttgtctatttagtagagatgaggtttcaccatgttggccaggctcatctcaaactcctgacctcaagtgatccacccacgttggcctcccaaagagctgggattacagacttgagccaccccgcctggcttttttttttttttttttttttttttttttttttaaagacagggtcttgctatgtcacccaggctggaatgcagttgttcaatcattgctcactgcagcctcaacctcccaggcttaaataatcctcccacttcagcctcttgagtagctgggaccacaggtgtgtgccactgtgcctggctaatttttttatttttattttgtagagatgggggtctctctatgttgcccaggcttggttataaactttaaaacaattagtctaaaattcattcttacacattatttaaaaagccaaatagttataaagcaacccccaaccattattgtttccccctttccagagacaatcccttttacctgttctggcttattcatatgccattttcttcaatatttctaaataatacattttttttttttgagatggagtctcgctctgtcacccaggctggagtgcagtggcacaatctctgctcactgcaacatctgcctcccaggttcaagcagttctttgcctcagcctctccggtagctgggattataggcgcccagcaccacacctggctaatttttttgtatttttagtagagacagggtttcaccatcttggccaggctggtcttgaactcctgacctcgtgatctacccacctcggcctcccaaagtgctgggattacaggcgtgagccactgcgcttggcaataatacatttcttaaatttttttttttctatttcaggcatgatatattgactcctcactatggagaatgaggatttatcattcctccctctccaccttgtctctgccacgtgtgaaccttgcccatcccccagttgtcccaatacaattatattttaactttagtaaggttaatattcagtgtaaaaactatttagagctgaactatatagtaataaatgattatctttctatttctgccagacctattgttttccatggaggtggagttcataattgcctttttttttctggcttagctttccttttttttttttttttttaattatactttaagttctaggatacatgtgcacaatatgcaggtttgttacatatgtatacctgtgccatgttggtgtgctgcacccattaacttgtcatttacattaggtatatttcctaatgctttcccttccccctcccccaaccccacaacagaccctggtgtgtgatgatccccttcctgtgtccaagtgttctcattgttcagttcccacctatgagtgagaacatgcggtgtttggttttttgttcttgtgatagtttgctaagaaagatggtttccagcttcatccatgtccctacaaaggacatgaactcatccttttttatggctgcatagtattccatggtgtatatgtgccacattttcttaatccagtctgtcattgatggacatttgggttggttccaagtctttgctattgtgcatagtgccacaataaacatacgtgtacatgtgtctttgtagcagcatgatttataatcctttaggtatatacccagtaatgggatggctgggtcaaatggtatttctagttctagatgcttgaggaatcgccacactgtcttccacaatggttgaactagtttacactcccaccaacagtgtaaaagtgttcctatttctccacatcctctccagcacctgttgtttcctgactttttaatgatcgccattctaactggtgtgagatggtatctcattgtggttttgatttgcatttctctgatggccagtgatgatgagcattttttcatgtgtgtgttggctgcataaatgtcttcttttgagaattgtctgttcacatccttcacccacttgttgatggggttgtttttttcttgtaaatttgtttgagttcttggtggattctggatattagccctttgtcagatgagtagattgcaaaaattttctcccattctgtaggttgcctgttcactctgatggtagtttcttttgctgtgcagaagctctttaattagatcccatttgtcaattttggcttttgttgccattgtttttggtgttttagacatgaagtccttgcccatgcctatgtcctgaatggtatcgcctaggttttcttctagggttttttatggttttaggtctaacatttaagtctttaatccatcttgaattaatttttgtgtaaggtataaggaagggatccagtttcagctttctacatatggctagccagttttcccagaactacttattaaatagggaatcctttccccatttcttgtttttgtcaggtttgtcaaagaacagatggttgtagatgtgtggtattatttctgagggctctgttctgttccattggtctgtatctctgttttgctaccagtaccatgctgttttggttactgtagccttgtagtatagtttgaagtcaggtagcgtgatacctccagctttgttcttttggcttaggattgacttggcgatgcggattcttttttggttccatatgaactttaaagtagttttttccaattctgtgaagaaagtcattggtagcttgatggggatggcattgaatctataaattaccttgggcagtatggccattttcacgataagattcttcctatccatgagcatggaatgttcttccatttgtttgtatcctcttttatttcactgagcagtgctttgtagttctccttaaagaggtccttcacttcccttgtaagttggattcctaggtattttactctctttgtagcaattgtgaatgagagttcactcatgatttggctctctgtttgtctgttattggtgtataagaatgcttgtgatttttgcacattgattttgtatcctgagactttgctgaagttgcttatcagcttaaggagattttgggctgagacgatggagttttctaaatatacaatcatgtcatctgcaaacagggacaatttgacttcctcatttcctaattgagtaccctttatttctttctcctgcctgattgccctggccagaacttccaacactatgttgaataggagtggtgagagagggcatccctgtcttgtgccagttttcaaagggaatgcttccagtttttgcccattcagtatgatactggctgtggatttgtcataaatagctcttattattttgagatacatcccatcaatacctaatttattgagagtttttagcatgaagggctgttgaattttgtcaaaggccttttctgcatctattgagataatcatgtggtttttgtctttggttctgtttatatgctggattacctttattgatttgcatatgttgaaccagccttgcatcccagggatgaagcccacttgatcatggtggataagttttctgatgtgctgctggattcagtttgccagtattttattaaggatttttgcactgatgttcatcagggattttggtctaaagttctatttttgtgtgtgtgtctctgccaggctttggtatcaggatgatgctggcctcataaaatgagttagggaggattctctctttttctattgattggaatagcttcagaaggaatggtaccagctcctccttgtacctctggtagagtttggctgtgaatccgtctggtcctggactttttttggtttgtaagctattaattattgcctcaatttcagagcctgttattggtctattgagggattcaacttcttcctggtttagtcttgggagggtgtatgtgtccaggaatttatccgtttcttctagattttctagtttatttatgtaaagatgtttatagtattctctgatggtagtttgtatttctgtgggatcggtggtgatatcccctttatcattttttattgcgtctatttgattcttctctcttttcttattagtcttgctagcggtctatcaattttgttaatcttttcaaaaaaccagctcgtggattcattgattttttgaagggttttttgtgtctctgtcttcttcagttctgctttgatcttagctatttcttgccttctgctagcttttgagtttgtttgctcttgcttctctagttcttttaattgtgatgttagggtgtcaattttagatctttcctgctttctcttgtgggcatttagtgctataaatttccctctacacactactttaaatgtgtcccagagattctggtatgttgtatctttgttctcattggtttcaaagaacatctttatttctgccttcatttcgttatgtacccagtagtcatttaggagcaggttgttcagtttccatgtagttgagtggttttgagtgagtttcttaatcctgagttctagtttgattgcactgtagtgtgagagacagtttgttataatttctgttctttgacatttgctgaggagtgctttacttccaactatgtggtcaattttggaataagtgtgatgtggtgctgagaagaatgtatagtctgttgatttggggtggagagttctgtagatgtctattaggtccgcttgttgcagagctgagttcaattcctggatatccttgttaactttctgtctcgttgatctgtctaatgttgactgtggggtgttaaagtctcctattattattgtatgggagtctaagtctctttgtagatctctaaggacttgctttatgaatctgggtgctcctgtattgggtgcatatatatttaagatagttagtcttcttattaaattgatccctttaccattatgtaatggccttctttgtctcttttgatctttgttggtttaaagtctgttttatcaaagactaggattgcaacccctgcctttttttgttttccatttgcttggtagatcttcctccatccctttattttgagcttatgtgtgtctctgcatgtgagatgggtctcctgaatacagcacactgatgggtcttgactctttatccaatttgccagtctgtgtcttttaattggagcatttagcccatttacatttaaggttaatattgttatgtgtgaatttgatcctgtcattatgatgttagctggttattttgcctgttagttgatgcagtttcttcctagcctcaatggtctttacaatttgtcatgtttttgcagtggctggtaccggttgttcctttccatgtttagtgcttccttcaggagctcttttagggcaggcctggtggtgacagaatctctcagcatttgcctgtctgtaaaggattttatttctccttcacttagtttggaagtgaagtttggctggatgtgaaattctgggttgaaaattcttttctttaagaatgttgaatattggcccccactctattctggcttgtagagttactgctgagagatccactgttagtctgatgggtttccctttatgggtgactctggcttagttttctgtcaatacccacttcatgactaattgtctgaatctccccttcgcatgttcagaagcatccagtattctatcggttcatttcttggagaagtctctccctgaaccatccagtcccttgaagtctgggctgctggtccttcaggcagtggcacaactggaatcctgaactctcccttccccaccattctggggattcccttcacttttcccttgtgatcagtgtcctgttttctacatcctatgacttttcatttctaggtatgtttctgtgttggggtgaggcatatccgccaatggctcctgagaaacggcttccttctgaagcatagaagcaacttatatgaacataatctcattttttttctaatttggcttgtaaagagtagagatctatttggagtctaaaccaaagaattgtgatttgaggaaggcctttttttgggaatctaagttaatattctaggatgtcacttgtgggcaacttaatttgataccagcagtctgagttagtggaaagggtagagggcttggcaacagaaaactcatttaaatttcccagttttgacacttgctagccagggaatttgagtcctgtaatctcatgagcctctgtttctttaatctatcccatgaggttggtgataatgaaacacacaccacccaccacagggccagctgtgaggctcaaacagaaaagccctttgtaaactctgaaatgctacataaatagtgtcttttttaaaaaaaaaacaaacaaaaaacagcggtgtcatttttaaagagggtaaagcttagaaaatttaagagagtgagtaattagtatgtcccttaaggtatctctttaacatacaggagcataatttgatagtcaggaactttagagccgtattgcttgtgcctgtgtctggattctgataacattttgtcctaacaatgtgaccttggggaaattaattccacatctttgtacctccatttcctcttctgtaaaataagagtaaggatggtaagagtagtattccaccccacagaattagattaaaggggcctgacatttgtgaagtgctgagagctgtgcccagcacatataagtgctatgtgagcatttgataaatccataaatagccattgtcttaaccgtgctcccaaacaagtgtctgagagcatcagttcaagtctctggtgattgattgctttagaatgccaagacttactggtattgattattaccttagagtcctgactctcacagggtaatatattgggacagataggttttctctctaaatatcatggagtttgccaattttgctattttttaagcttcccccctcaatggtagacaaagaaaagactctaatgccagaaaaacgccacttttccacttaagctcctatatagatttcttaacatgagggggctggaaacagccatctgagaaagatgttacttattttttttccctccagaagccagagagaaaaataagtcattttattgaactgctaaacaatagatttttactttgcattattgtgccagatacttgagcagttctcggaagaaagggaaaaagaaaaagtccagagaaggcagcaccatctggctgaggacagttcagagcaagtgggagctgggctggaggctggacactgagcaagacccacacacagtgacccttccccaccgtgggaaacaggaatgggagggcagctgcaggtgggctgggattgtctggggagagctggccaccctcagtagagggggcaggggaagcacctggttgagtggggatcagagcagccgctctcttctcagccagctgctccacgtggcagagtactcaggacaaccaggagggccgccttgttgcagctgccttcctcggtgaaacacagaggaaggcaaatgccttctaagtggcagtcagtgctttggcaatccctccaccccacaccccaccctacgccccacccctggagtttctcaactgggccatgctctttgaatgcttctcctgccaaggcctaaaagaaggtgagtggttgtggaggcgagaacaactggaggctgtgctgtagagaagggagtgcagctatgacccccacagtgagccccttcctaagtgcctcttccccaaacagaaattcctgcaaggcctcctgtagtcacctgttagactgcagaaccggggaggcactccatttgtcagtgtgagttgctcagaaagaaacgcccaatatcattcaaagttattggcttattattagtctttattattaatttattagtactctttattattattactttaattgccatacagatggagggtcctttccacctgagcatatatattctctctactttgtgctctcatttatacttcttcttgtgcacatgtgcatacataacacacacacacacacacacacacacacacacacaaagtacgtagaccttaaagccccatttatgcttacatagacacaccgtacacatacacgaatccatttggctaacttttaaattcctcagtgctgtcacttttgttgaaataaattagtggagtggctaggtgtatacttcccacagcgagccagtgaactaatgtgcagggaatgattaaatgtatacaggggcatggggagccaactcctcttcaataggggtgtgaaattaggatgggaaggctcctctcccaggtgccttgcttttattaaaagacttaagagctcaggagatgtcttcaataggaattaggatatctgagtctttctggaacagtgtggaaagctgaactgtgcttaggaactctgcaaggtctttttgatccttaaaggttctgatataaaaacctatccaggtttttataaaagtagtaaagtgttttcagtcttttattaatctcttcatacccttaaataacctttccccttttgaacagtaattgttaaaaaataaataaaaaacaacaaaaaattttttctcattgttttattcttcaaaccaggcatcctcttaatgcaaggattcaaatatctctattagggtcataatagtcagcaatttccatttaatgagatcagcaaagtctcttttcaaagagatgcaggctttaaattgccagttatttcttttcctgcaattcctaggaatccaattaagtaagactgagtatgatctataatgtgatatatctggctacagaaagcccgggcctaggcaataaaacagatctttgagctccagctcaaaattaagattaaaaaaaaaaaaaagaaagaaaatgcagcttaaatgattcaaagctttataaatgtggaaactgcatccatttcctctaatatgaagtaagaaatagcttcgagactatggtgaaaatcattaaagttacttattccaaatatagctactaattaaaatctctccgttggaccaggaccacaggtgatttttacaaaataaatttaagaggttttggtttgctaaatctgtgactaacgaatcaaatatgtggccaggcgccgtggctcatgcctgtaatcccagcactttgggaggccgaggcaggcagatcacctgaggtcaggagttcgagatcagcctggccaacatgatgaaaccctctctgcactaaaaatacaaaaattaggtgggcatggtggcacacacctgtaatcccagcttctgggaggctgaggcaggaggatcacttgaacccaggaggtggaggttgcagtgagccaagattgcaccactgcactccagcgtggctgacaagagcaagactccatctcaagaaaaaagattcaagtgtatataaccactgccaaaataaagagaagatagtgtgaaatcatgcagagaacatgcttcatatcaaaacatagtattcttttcagtttttaaaaatttcatttgccacaatttataacagtattaaatactatattttcatttattattattattattattattattttgagatggagtcatatgctgtcacccaggctagagtgcagtggtgctgtcttggctcaccacaacctccaccgtctgagttcaaccaattctcatgcctcagcctcccgagtagttgggattacaggcatgtgccaccacacctggctaatttttgtatttttggtagaggcaggatttcaccatgttggccaggctgatctagaactcctgacctcaggtgatccatctgtcttggcctcccaaagtgctgggattataggtgtaagccaccacacccaggctaaatactatgtttttaataataaatcagtgggtgtattttaagtcataatttagtattctgatttagagacagagttcagcaataatatcatacttttgccatgtatttttaaatatatcaaagcttctcaggatggtggtagtggtggtttaaatcttattctgtaccggctatgcaggccgcatggtgttttgctgataacagaggaggaaagtgtggctcgtgaggagcaaatgtcaagtcaggaattaactcaagacacagcctgcccttctactaaaaatgtgctatttcaaatatgtttttgcaatttcctccatgtaatgcagttgtgttagccatttattggtcagaaattaacctccaaaagttaacagttgggccctgaattctcagccaagtctagtctaagaagcagcatattcttgggcaagttattgattaactccaggtaattaaaccaaaaagacttttctagggccagggatagtggctcacacctgtaatcctagcactttgggaggctgaggagggaggatcacttgaggccaggagttcaagatcagcctgggcaacatagtgagatcccacctctacaaaagaaaaaaaaattacccaggcatggtggcatgtgcttgtggtcccagttactcaggagtctgagatgggaagattgcttgagcccaggatgttgagactgcagtgggccatgatcatgccaccaaactccagcctgggtgacagagtgagaacctgtctcaaaaacacaaaaaacaaaaactctccctaaacatctgtcaaaagagctcaaaagcctagagagaaagatgagccaggtgctggccggagataaaaggccagctttgtctttggtttcccaaagactattcaagaattggagggtgaattcttggagcctccaggggtagaagaatgaaactaaggttgaacaccaataggcattctgctgagcatttcatctaagccccctgccattttgcaggggaaggctgataacctggcccaactggtgcaggtctgcagggcatggggcagggtggaatgttgtcaagagtttctctttcctagagctgtggatggataggtacacaggggaaagcaaagtagagagggccagtaagtggaaaaaaactgttccacatagtcagagcaaagggagcctgaagtaggtatgagagcccaaatttgtggtcaagacataagaggattaggaagaacagacctaggaacttctactggtcagggccatcatggctccctgtgctggcagccatgattgggctgcttcactggagacatgctgcatgccatcagccttcaactttgagggccacaggtggggtgggcactaacacatctccttcctgggtttggctggaggacagtggcctccttgaattttggcccattcctaaactgaaggcagttccccaccatagttccttccagcctctccccttcctaagagggccaggctgtggagctgaccatggtgctgaagatgatctgagattgattccagagaacatttagggagtacttcctgtgtgctagcactatttctaagtgctctgcatgggttaactcatttcatgttcatagcaattctatgaaagaggtgctattattctccccattgacagatgacagataaggaaagtggaatacagagaggttaacaaacttgcccaaggtcacacagctaataagcaaggaagccaggcagagctgcactttgatcaccacatttgctaatgaaggttattaacagagccacacaaaacctcctggattttcacttgtccaatatcatcctagcagaagtgagccaaggttccccatctcaagttgccaggcaggttgctgtggggtggcatcttggagagtcagacacagtagtgtagactggttgggtacaagcaaaagtgggcagcccacctactccatctagtcagtcaccacaccctaatgttatgacttacttcatacctgcttccctggtaggctcttggctttgtgaagagggtgccatcgtatcccccattgcttaccagggtgcccaagacatagtcatagtaggtattcagcaaatattttatgaataaatgggttacatgtgatcaatatatggtagctgttattaatttgctattatttcaacattgatagaagcaccatgttgtagaaattatagtccctttttattttatatttgtcatgccccactttgggagttatatagagttcagagtgcatcttagtctcatatagatgcatgtgtggagacagaaatgaaagaactcaagtcatgagttgaacgattttaatgcctaaatacatgtatgactgaatttttgttatatgttagatttgggatcttacagtatatttaagatttaagatcttatagtatctcaggaagatagttccactgacatgaaaataactctgaactgtctcttttagaggatgtataagcattccatgttaacagaacttgcagtggcagttagaaaatattccagtcaaatttctggttttggagctgagtttattgcctgtttgttgtttgatcttattcaaatcatgtttttgttgtgttgtattaatatataaaagatttctgtgtctgccatgttagctgtttgtgtgtgtgtgtgtgtgtgtgtgtgtgtgtttaaacaacactccacagctgagctcttggaggaccaggcctattttgacagctccccttagtccatgtatcaccaagctcattctctgccaatacgttccacgtgattttgtggacatgtgtagcacgcctgtgcaacttgcaaacacccatacattattacaataataattgggttttgatgcaactggaactcagtactaccaagctgccagcatttccttttggctaccagtactaggcaggaaaattatagcctaactgtcttcctgtttattgataaacaaagtggccagcccagcaatggagcctgattagcagtttgcaccctttgtgaaaggataaacagaaccctactgttttctgtgtttgactgcaatttgcatctttaaagaggttggactgccctgagattcatgttcaacttgagtgcctggatgttctttgatatgttacatgtcagcctccttgttttcctctccttcatcttgaaacaatatttgccagagtttctctgttcccatctggcttaccataagcttccccatagtcacctatctgaagaaggagggagggaagaggcaggagaagaaacgtctctgtttcactgcgctcaaattttacattcccagaaggccctttaatgtcatctcaattccattttttgaagagatagtaatataagaatgaagaccaaaagacaaaagagaatctgcttactgctctctttggcccatgggatcatgtttgggctcgttccccctccatcatcttcactcactcagcaaaaagtgccttccccctttgtaaagtgaaatgtggtattagtcacctacctcaagtttggtgagtgttctgttctgaaatttattctaacctaattagattcttaaactaaatggtaacagagcaaatagttggctccctctgtaattattttccagtgaaagaaatgaagatcattttaattggaatttgcatgatgtaaaagagagtattaatacatgtaaacatccattaatctgtttaaacaaactttccccttaatccttaccgtatgtaaacaacatttgttttgccttagagatattgcatgattggacccacgagactccagttatcccactgaacagttacgttttataacttcaaaagaaatgttatatatttattggaggttgtagggtgttaagtgtagttagacataaattgtacctcagctattttgttaatgccaatagggattaaattagatttttatagctgctgtagaagtctatttggtagttaacaagtgggatttttaaatcctgggaaacataatcctattataacacaggcagctgaattaacataacccaggaagggactcttcgtggattagcattttttgacaataacaaagaaaatcatcaaattgtgtggggatattacatgcttttctcaaaagtaagaacagcgaattgggaaaaggaaacgagaaatggccaaacatgctatttcttagagaccgtttctttttaagggaaagacagtggaggctgggcagtaagctgaataaatgtctgctattttctgtgaagtcagtaatgctttttcagttattattaaactcttgaatctgagaattatagagctggaaagaactttgacatttatttaatttttatagtcctattcaaatatttacttcaaacacttcagaaagatggatatatctcacatatatacatatatacacatacatataaatatatacacgtatattgcatgatatacacacattcacacacacacacacatacacacacacttaatagtatatgagtggcctttttaaagaagagcctttcttaagtcttagcaattggttttcacatgctggtgagggtgattattagagcttgcaggacttgccaattttcatttgcacgggtatcatcttagcagataatcacatgggcatcaatcactggcatattattgtgttagataattgcatgggcatcaatcatgtgtgtatctggagcaagtcatcatgtgggcttcaatttcatctatctggaggaaggtaattgtgttggaagcagggaagggtgtgtctacatggcagataatcacatggggatcaatcacatagatatcgaggtagataatcctgtgcagatccatcacatgtaccaaagtggctaattacgtggatatcaatcatgtcaacaccctggttttctggtacaggttacacgtgaagcacacatgttgtgtgcctgcttatgtgggagaacaggtcagatgtcgcgtgcacccacccaggggcctgcagcggtgtggtgtgtgaggaagctgagccattcagagcgtggccttcctccacagagcgctggaaatgccatgattagggatcctgttgggattcttttattttaaggctttggctcctgccaaaaggaaatgttcctgggaggaacatgactgcatgtagaagaacgtgcagtttgtcgtcctcccctcactggcatctatttttccctccttcagaccttgcctcccaattccttctcacccacatggtttgggtgtggcttcagccccagtggagtctggggctcagggccaaccagtcagtgcactgcattccactggccaccatgattggttcaggccagaccacatgacttcagccagtccaatcagagtgaatatcaggctttttggggagaaatttaagggagagttcatttctctctgaattttacctgaggaggtgagattggcgctgctgctgcaaccagtgcctgggagaggctgatatgtccaggccccaacaaatggagccagaaatgaagccacctacagaaatcagatctgagaggtggagagaaatcctgtcctgaggatactgcttgggcctgatttcagcagtccctgaagcaaaatccctggcctggaaaggctcacctgagccaatacaatcccttttggcttaagacataattgtttggccgggtttggtagctcacgcctgtaatcccagcactttgggaggccgaggtgggtggatcacctgaggtcaggagttcgaggcaagcctggccaacatggtgaaactccgtctctgctaaaaatacaaaaattagcctggcatggtggcgcatgcctttagtcccagctactcaagaggctgaggcaggagaatcgcgtgagcccaggaggcagaggttgcagtgagccaagattgcaccactgaactccagcctgggcggcagagtgagaccctgtctcaaattaaaaaacaacaacaacaaaaaaaaaaaacaaaaaaaaaaaaacgtaattgggtttctgcccccttgcttcagaagaccctaactgataggataaaatcatctgagtctttcctgaagaacaaagtttcataggagcagccccagtaggggaaggagcagctctgagggtgtaagtgagggcagaaggggaagctgaggcttaaataacatcaccgtcgcccttagtataggccttgagctgctcttggcaactgtcaccaggtgccccccctccacacgtccctgttggagtgccccagtctcctggcctctaagcatctgagctcaagctgtgaggaacgtttgttaaagacttttaaatgcaggcttaatgttttcccttttccccctgcctattcttattactttgatatttatcaaatacagtttgtaatattaattacacattaatgttgaagtgcagttcccatcaccaaaataaatgaaaaaataggtgtcctcatggcaagaaccatactgttccaaggcattcttttattgccatttcagtagacagttggattttttttttatcagcctgaatgtgacatctgataattattgatttggaaagagataaaagttttggaaaagaaagtaatagaaaaaaaagaattctccttgaagttaaatagactatttcttggaaaagcaaaatgggagtttatatgctttgtctaccaaattctgtgtggctaacagcttgtgccttttctccttcagtttttattcttgttaatactgtcactttctgcgtatgctaaggtttataagaaggtaatgtgacagttgatagaaacacctagtaagaaaacacggccgggtgcagtggctcacacctgtaatcccaggactttgggaggccgaggcaggcggatcacctgaggtcaggagttcgagaccagcctgaccaacatggagaagccccttctctactaaaaatacaaaattagccaggcatggtggcgcatgcctgtaatcccagctactcgggagaccgaggcaggagaatctcttgaacctgataggcggaggttgcagtgagccaagatagcaccattgcactccagcctgggcaacaagagtgaaactccatctcaaaaaacaaaaaaacaaaaaaacacacatcactgaaatttacctagaatcttttttttagtccctttgggctgctgtaacaaaacactgtagattgggtggcttaaagaacaaacatttatttcttacagttctggaggctggtacatccaagatcaaggtgctggccagttcccagtgagggctttctcttcttggtttgcaagtggctgccttctttctgtatcctcacatgaccaagaaagaaatcatccccatcacattggggattagggcttccatgtaagaatttgggggggatatatttagtccatagcaatcttaaaacctcattttaatttaataattccaaactcttttttggttattattgttaaatttcactcaaactttagacatagcagaatgtagcacatttagtttgaaattcacttattttgggggggtccagactctagttgaagttcagataaacaataggatggctaatgggaaaggggggagctataatgcttcactcattcacagacctcatttcttaagtccctctcaccagtgcagtacacaagttctcacttgctgcaggtaaatatttgtgaaatgaatgcatgtatgaatgagtgactccataaatgactggtctctggctggaaggcatccccaggactttagatgggagtgtgagagatagacagtgtattctgcactccaagctgcttgtgtggtcttccctctgcccagcatccttgggtcttgctgggaacatcttaactcatgaggccttccaggactactcagactcagttatcttcctggctgtatattctacatgtgctatatgtactttctgttctgtaacatgcatcaaacctcaaatacacgtacagcgcttaccgttcacactagactggacactctgcaggcagggattgggtgtatattgccagcacccaacactttcccagcatgtgccacttcattactcttagtggaggtgggaatggcatgattgtggtggactctcaagatctatcccacttctctgtaaccaagcaaatcggtaactcatccaaactcaagggctaagtctgactagaccaacaaggggtaattcagccctccttgccagccctgacttttcatcaccagtgacagatgtggagtggccggctgaaggtttctaggaaggttttctttcctcttaagagaaggccatggcaaatcagtctttcctttctgctaacaatgacaaaaggatgtgttgctacagtcactaaggatagcttgccctagaacaaaggcaacattgtgggttggagagtaagtagagaatgaatgggcatccttgatgacactgctcagctgctggcttcaccagcccatcgctggatgttgtcacataaatgtcgttagtgtttaattaagccagtctgaatttgggtttccaatcttccagcccaatgtatcctaactgaaaaggaactgcagtggaaagcctatgggctttggtgtccaatacattggatttgattcttcttagcagtgtgaactgacctgactttcctaatatgtgtaatggagaaagtaatacttctcacctggggttgatgtgtggaacaaagaaaatatgtatgtaaaacacttaccagagtgcctaaaacacaaccaatgttgtttcttttccatttaggagatggttcacttgttgatctggggggtccagtgggttgaattgatcaacagtgaaatcagtaaactctctggtcctttgcacatgaactgtcaggtagttcaccgtctagtatgggagtcagatagacattcgcggtcacactaacagtggggttcgactgcagtcctaactggagaacagtgtccagctaacagaggttgagagtactgatcaaaccacacctgaaggctggagtgcaggtctcgtagccatgaactagagaacaagaaacagcggaagatgctgaggatgttaatactgaagaaaggacgaccagaaaacagaaacgacttcaaagagaaaagggagtggaatcgttctgtgctgcttcagagggtggagtgaggacagaccccatcaacaaaggacgcaagctttcactcaacaggagaaataactgtctgagaattagcagtgcacaaaggcagagagcgagcacctcatcaacaaagcagctccccttcccagcagccactcatcaggaagtcctgctgcaggagtttgggccacatggcccccaagggctcttgcaaagatctggatttgacattaaactgttcagcagactcttgttgtttgggctacagcaggtggatctagagagcttctctgttggttatactgttgctgttgtttttctgaattccctccgtcttttttctgacttcctctcttgttggccactataagcaccacccaaactgacctttcacctctaactgtttttttttccatgctcccttgatgatcagagagatcctatacatgaagacagagtaatgggatttgtgcagctgcagtgcagtttttagggaagcgaaaggctccctgccctgtagtcttcctgtctcgcctgcctttatacctgaaatgttcccttttccctcatctttcaactaaggcatcacctccagaaaatacttgataaatgtcaatatagtaactggtaagttgttaatatatcacctgtgagggataccatattaatgccatatgctttttaaaaaagtgataaaatatgcagaacatacattttaccatttaaaccatttttaactgtatagttcagtggcattaagaatattcacattgttgtataatcatcaccaccagcatctccagaacttttcatcttccccagcagagactttaccattcaacaataactccccatttccccctcccgtccctggcaactcccattctgctttctgtctatatgaatttgtctactctagatacctcatagaagtggaatcatgcagtatttgtccttttgtgactggcttatttcactccgcctattgtcttcaagattcatttgtgttatagtgtgtatcaaaatgtctttcctttttgaggctggatagtattccatggcatgtatataccacattttgcttatccgcttatctgtcaatagacacttgggttctttccactttcggctgttgtaaatattgttgccatgaacatgggtgtacacgtgtctgttcgagtccctgctttaattcttttgggtatatccccagaagtgggattgctggatcatccggtagttctttgtttaattttttgagaaattgccgtactgttaatagcatatactttaaaaacctatatgttaaccaaggagaagaaaacaagttaatttgaagagagtcagaaagcgtgagtgtccagagcctactgagccctggaagtcacggataaaaacaagaagtgaagtcaacactctcggtgagaaagggagcggtactgacaaacttctaccatcccagtgtgcccggttgctcccacgccctcaggatactaaagctgggaggaaggagggggtgggggaggggactcagagggagagctactgagtgcctgcagggattatttcgaggtgcttttgcatccattaacttatttaatcatcaaaacaactcagcaggtgcccttatttttatggacaagtcttgtcaggtacttaacatttttaatttttattgcttttaaaagcaatgaagaatatctttaagagggaagaaataattctgaatccaccaagctcacacaaaattcacctcagtactgccctattttcctttgctccctttgcagccataatttttacatggttgcgttgttgtcatttcattttctactttttaaattgctacagagatctttgtatttattattttaacagatgtatagtatgcatctaatgatttcacttcaattcagttaactattcccctaccattgaatatttagattgtcttcagtttttcactataattttataattgttttataacaagattttataattttagcaataaagagtttcatgtacataacttttttcctcttatacttatttctttagaatgcatttctaggactggaattaccaaatcaatgggtacaaacatttttgtgaattttgttatacactgctgaagtgttttataaaagggatgtttcaaaagtgattttttgaagattgataatacattttcaacagcaatactggagtataccagtgtctccacattaagtattacttttaactttgttttattacttagtatatatataagtatacttaattgttgccttaattagtttttaaaattaattgcatggtttccatatgcttagtaactgtgtttcatatgtattttgtctcattacaccttttacccagttatctgttggatgaccctagaagtattgcattgtaattaagaccaaacaccagaagcaaaggtagattcagttcttacttttgttacttccttaatcttgggcaagttaatatttcattttgttaagcctcagatttctgatctttgaaatcagaaacaaccatagtacctacttcattagattatttcagaggtcaaatgaggtaatgtgtctgaaccacttcagcacaatgcctggcacatggaatatgctccgtaaagattagatatcttcactgttattatgtagagccattcgtctgatttttcctcctcttaccatattctaaatcttctgttgtattacctcttacccttgggtagttgagctgctgggagttggaagtaagggcagtggagtttgttcagggcaaggcctgccatctggttcacacatgggtgtgatctggtcagactaaacagcattttaactccagatggctgtgtctacattctcgtgttatgtggacggatgatcaacagtggacttgcaggggtggaaggatgtacagagaccctattagagctaccctagtgcttccagttagagctggtgttcacacaagattgttgaggtagggctaccccattcgcaatggtattcaaggaggaaagtagcctcctgtctccagccagttcaaccttcactgctaattcctgtggctcctgctgcagctgcaaaccacaacccactgatttctcctcagatagagcaagaaggggcagaaagtccggtccacatctattcagaacttagtagttgataggtgcgttctttatgctttctcactgagatgtgtctccccgcatgtgcatgactaagccacgaaggtctgatttgacgcagaatccactggctggtattcagttatccataaggattgagagccagcacacccatgttcctggcagcattattcactgtagccaaaaggtcgaagcaacctaggtgcccgctcacagatgaacgggcaaacaaaatgcggtgtctttgtttttaaaaaggaaagatcttctgatacatgctacaacatggatgaaccctgagaatattacgctgagtgaaataagccagtcacaaaaggacaaatcctgtataattccacttacatgaggtactagaatcatcagattcatagagaaaggagaaagacagtttccaggggccgggggggaaggaggaacggggagtgtaggaagaggaaaaatgttctggtgatggacggtggtgatggttgcacaataagataaatgtacttactgccagtgtacactctaaagggtttaaaacagtaaattttatgttaggtatgtttcaccataataaaatattttttaaaaaggaaaaagaaaaataacttgggcctaatctaggatatgaagaatatgagaagagttaaaagaattttttaaaaattagcagcaacttgtgagagaaggttcctcctcaaagcggaggaaagaattaggatagattgtagtttagacccaagaaaaccaactctgttcaaagcatatgaacctgaagttccctgtggtcatggcaaccttgggaaggttcaggatcctcttggtttttgtttttgtttttgttgttgtttgtttgtttgtttttgaaatggggtctcactctgtcacccaggcttgagtgcagtggcgcaatcacagctcactgcagcgtggaccgcctgggctcaagcaattctcctgcctcagcctcctgagtagctgggaccacaggcccacacccccactccaggctcattttttgcatttttgtagagatggagtactgctgtgttgcccagactggtctcaaactcctgggctcaggcgatcagcctgcctcggcctcccaaagtgctgaggttttaggtgtgagctactgtgtctggcctaggatcctcttgtagaggaacggtcacctgagccctttgtgctggagaagatatctggcccataagcaactttagtcaccggagataatactataatttatagacttaaaaaaaaattatagacttaaaagcagtgttgaaatatttgaggtttttcttgttagattgagcttttgaaggacaagaaaatgactgtattaaattcatgaatatagttttgaaagtttaagggaatttaataaagtcgtaaatggtgccaattgaggtttcaacttgtttagatatattcaacctgaagtaatcaattttgtttataaatagaatgataacattggaggtggaggacaaaggcctaaggcaggtgaatttttgaattggtaattttaatgaatttaatattaacttaaaaaccaaagtaacccacatgatcttttccatgttgaaaagctgccttcatacatcaaatttcacattgacagctctgatcctggtccttcctattctaaagtacagttgctgacttatttgtgggtttctcccatgagtatgtaagctccttaaggccacaagcaagttcacgtcctgagcatctagcacagctggacacacacacaagacacttgtcagatggctgggggaggtggggtgggggaaaagaaattcttgaatttaccctggtactatatgcttgttaattgtttagacacacacctcccagcttcctatgacaatttccattttgatatctatttggacatttgctaaatgaagccatccacttattttaatgaattactatatttataataaatataatttaacaaataaattatggggagtattatttattttaatcgtcctgtagaactgtattcaagagtatctacacaaggggtgttcagtccttgtttgcctgcataactctcctgaacacaaaatgttacttctgggagcctcccttctgtgcatgaccagtgtcatgtggaagaccaccctctccgatggtgggctcaaggttctatgtctgaagtccagaggcacttcatttggatggcagcatcaagatttcaagcttggtaataaatgaagagagggttcccaaagtgtcttgtgaaagttgggggaaggcattccccttctgtgagacagagctgtgtcttcctgcctggcttcctcttttggcacctttcccctcatgggggaatggatcctgaagcgaagaaagggatggctgcaggccccttggctgtcacgctgttagcgattagctgttttcagcaattatgcccttccatcgagggtgtgacggctggcgcctctggtaatgagctgccttccaaggctccctcccggccttcacttgctgctctccttagtggcctcagagtctgctgacattattgccaatgtgacatgttcctcttggccaactcgggaagacatgccagtctgccagtgagagagcctgaaggaacttcaggagagaaacatgaagctggatgaagccaccaagcagacttgtccccagggaatggggacatcagctcatccatcccgactagctcaaaacgctcaagaataacctatgcccaagttttgctggcaagtggaaatgtccattctacattagaatagcataggaggatttttttattattatcacatgggagttacattgttggtgaagtcatactagctagataaatgattaactcggtaactcatcaaataatgattgagaaaccactttgtggcaacacaaggctatcactagaggtgacagaggtggggaaagtaagtgtagctcctctcctctccgggcttatggctggtgagacagacatacatcattccagtggccactcacatcaatgtttggttgtgaactgtcctatgtgatgggaagagaaaatacaagagagtgtaaaacaggactccagggtggagagagggaatccctgtggaaatgccatttgaactaggagctgaaggatggagaggaggtaactagacaaagtgtggggtacagtggggagtggagcagagagagaggctgtgggtggagggggaggcacatgccaaagccgaggggtgacaagaagctgggcactgccaagaaactgtgagaagcgaagcttggctggagcggccagagcccagggtcatgcaggatgagcctagagaggaaggcaggggcctggtgatcctggacttggactgcagtgaggattttagatgtattctaagggtaatggaaggctactaagggtttcaagcagcagagatatgtgtcttgcaaaatagcattctgaatgcagcagaatggatttgagctgggcaggtgtggacggggaggccatcaccatggtcaatgagaagagtggagggtgatgaggaagacagaggacatcagagactgaattccctttccttccttccctccttcccctccaaacgtagccctcctgtcagctccaaaaggcagaagtgggttctttttcttagaagaccattccagttttctaagcaaaattccgttctcttctccttcctaagaaagtttacaaagaaacagaagcctacaatcccatggcagataaaaaattttaggagagccacgttccggttctgaaggagcaaagacctcttccacacacacagtggaccctgtggtgccactctaaaacccatacctccaggcccattagaacccccaaagtgacctgatttccatcaatcccaaagccagccaagcaaggttacgtttataggactccctcctggtgacagtccagaaaacaataaaaacagatgcaagtcccactgtggtacagaagcccactttggaaaccagggggtcaagtgcccattatccaggtaagcaggctctccctaggagaccaaaaatgcatgtcaacatgccaagtggagaggggctggaagccacaggggccacctgggaagggaggcctcagccaggcagtaataataaaaccggacaatgccacagagctggcgtggctcagccaggagccagggaaggatgggggtgggaggaagggcctcccttcctccaaaatcaatgtccctgttaacttgggcagaagaaaatctgacagctctggaaacctgcccatctgatgagaaggaggaagctgagaagcggctggagccagagaaagcccagaaatggcaggcgggatcagttgcccattggggacctggtggcaggagctctctgcattgcttttactgacgcccaggaggacaggtgccactgccagtccccacacgacctccagctgcctcctaaagcagcccgcccctctgatgatcctggctggatttgttttatgaaaaatccacgaaacaaacagggcactcagcttctgaacccagttccctgggggctattccattttgttatctggaatataaccgactgagaggcaactggaataactgaaatctacagagaaatacaagtcttgacaagtttcaggaaaaaccacccttcttattgataaagcaataccagccaactagtcactgatatttatttaatgcctcccatatgaagagagtagcatgaatccacaatcctgtatccactattccaaaatccaaaaagctgaaaatcaaaagttttattattaagtttgcagccgacatattgggcagcaaagcctgacctaaactgctgtgagactgagacttcttcctcatagtgtgactgttcctacattttgctccaggttttggggaggggagatattaaatagactgtctaggtgccatctaaccattttaaagtccaaaaacttcttaagtccaaaacacatttgtctagagttttctaacaagggattgcacactcctattgttatgggtttgaggactcacagtccagtagaaaaacaagaaatcccagagaagactcaatagaaccctttgcactataaatattttatagacatatagatgtttggggttacagaattacataattcccttctgtgtagtctgagtacagtttccaatggagacagcctgcagtgaggaaaacatgggtttgggaatcagaaggtggctgggccagtattaaatgcccctgtggccttgggcaggacttttctcctccctggacctcatccataaaatgaaagaatgggacaagatgatttctacacacacttccggttttcagatttctgtgttctatgacctccctataggagggataaaggaccagggagcaagaagctcagaaaaggtctcttttccacatgaagtgggaaaaggaaaagcgtaatcacgtgctggaccctgactggagatggaagtaacaccagccggttaactggggtgactcatgtcaccagttatggaactactcagatccttgggtgctgagtgaccaatacccagcctctggatggtagcagccctggagacaagtggggccaagggggggccctgtcatgccaaagctgtgatatcacatactgctgaaattgatttggctccatttcctgcatacctagcagatttaccagattgtgaaaatgaatgttttctatgcgcgtggctgatttttgcatgcatctgttcactcatctaaaccttagttacatcctgctaggagaatgaaaggctataatttcttcttctttaatctggaatagttagaaacaccatgatttttgctttaaaattctgcaccaaaatggtgaaccatttttatttttgtctcaggaaaaaaaaatgaaatgatactgccgtatttttttctagatttgcaaatgatcctgaccttaatgggggtcccatgcctgagaacatggcccttggaatagaaatatccagtggaatgcaaacatgagtatctaaacatatcatttgcatctgacattaataagccctttctggctttcacgtttccattttagatgacagtgccgtcttcacatgtcaggggtcaagtgcaagaacagtaatactagtatttatttagtactttgcatttctggggtgcttttattgcccttaattagtaaaccacaaataatttctgctcagtagcttggtactgcaatcttcagtgttcatggggacagtgtgctgtagtgactaacaggatagactttggagtcagtcaaactcagatttgggctctgcctctgccactaacttactgactaaccacttaccacttactaacttaccactaactaactgacttcagcaagcttcggtgtcttcatctgtaaaatggggatagcgacaggcttgtcacacagagtggatatgaggattaaatcagaatatgcatgtaaaatgcttaacgtaatgcctgacagtagtactgtatatatatacttatatataagtgctccatatgccttccctgtaaactagatgttggatacgttgccgtccgcaagtccttctgcctctgagaatcacatcatagcccaataagctacttaaaatggaaaagtccataggccatccccgtggaccaaagtcctgccacctttctggactctgaactccctctccctttccttctccaactgccaaagcctcttcattcttcctacttcattttgcacagaaatttggtttctttcactaatcctttccagccttactctgagggctctctttccactcacaagtggcccaacaaggttttgtttgttttcttgttttaactgaacagaagatcattctttccaccctaagtttttctatacaaattatattgaagatgattattacaatgacattttcaaaaagacaattctctccctaaagaattccgatacctgcttttaaattgccattcccctctcctcatggtatagatattatagtttacaacaagcccaggttcaagggctggtaaacccactgaaaaatcaaagaactcacccaagatcatgtagtcagaaacagagactgaattcagggcatgggaacttaacctcctagagttttcccaaaagcattgtttgcccctttgaacatggaaacaaaaaatagggagaagaccagacacagtggcttataattgtaattcctgcactttgggaggccaaggcaagaggatcgcttgagcccaggagtttgagaccggcctgggcaacatggtgagagagatcccttctctgcaaaaaaattaaaaaactagccaggcatagtagcattcacctgtggccccagccacttgggaggctgagacaggaggactgcttgaacctaggaggtcaaggctgcagtaaactgtgagcacaccactgtattccagactgggcaacagaacaagaccctgtctcagaaaaaaaaaaaaaaaaggagtctgggcgtggtggctaaagcctataatcccagcactttgggaggctgaggcaggaggattgcttgagtccaaaagtttgagactggcctgggcaacatagtgagacctcatctctacaaaaaatcaaaaattagcccagcataatggtgcatgcctgtgggtcccagctgctcaggaagctgaggcaggagaatggagcccaggaggtcaagactgcggtgagccatgatcacaccactacacttagcttgggcaacagattgagaccccatctcaaagagcaagccagggtgggcctcttaaagcacaggtttcttgagtggtcccagaggtaacacaccccacatggtctcactctgcctctaggggaggcacttcagaacccactgttaatcaggacaaaggatccctccgtggaacaattctggggagctgcattcccaagaacagcagattaaaaatcaaatccgggaaaggagctaaaaccttgcgtgctgcaagatataactcatgtgtacgtgtttgtgaatggcgtgtggggatggtgcatggggatggtgtagatgaggggatggatggacctatgaaaagctcagagatctatcagagcaagcctgggcaaaatagcgagactccatctctaccaaaagaaaaaaattagccagatgtagcaaaagaaaaaataaatagctgggtatggtggcatgcacctgcagtccagctacttgcagggctgaggacagaggattccttgagctgaggagttcaagaccacagtgggcgatgatggcgccaccgcattccagcttgagtgacagagcaagaccttgtctctaaaaataaataaaaaattggccaggcacggtggctcaggcctgtaatcccaatactttgggaggccgaggcaggcggatcacttgaggccaggagttcaagacaaacatggtgaaacctcgtctctactaaaaatacaaaaattagccatgcatgattgtgtgcacctgtaatctcagctactctggaggctgaagcaggagagtcacttgaacccaagaggcagaggttgcagtgagccaagatcgcgccactgcactccagcctgggtgacggggagtgagagcctgtctcaaaaataataataattaactaaaatttaattaaaaattttaaaattttttgttaaagatctatcagcagagcagcctggctgcattttgtataggtacagttatccatacttcaattgtttctgaattccagtcaaacaacttaacatagtaattatattcgcaatgactaacttagtatttaccaagtgcccaaatgttcaaggcattgcactggttagatttggcagaggacagagaaatatgaaatagcaattttctttttcacattgtccagtctaagctctggctataacttctatatttggcataaacaacagtcaccagagaccaataagacttggtcatttgttctgatttgaactcatttgtttaacaaatgagaagatttaacatcaaaatgccaaccttgggacagatatctgttttccaagatgctgaagcttaccaccaaatgatattttgatgtgctatttaggatgtttttgcttgaaactggctctcaatgactgtgcccttacttttgctggtcaggagcacagtgaaattgctctgaaaacaagcaagtgtcttagaaccccaagaatgaggcagtagcctcgtaaaatgggccctgctatgacctgaatgtatgtgtcaccctcaaattcatgtgttgaaacctcaatgtgatggtatttggaagtggggcctttgaggagtgattaggtcatgagatggagcccacatgaactggactagcgcccatatgaaagaggctcctcagagctcccttgccccttgggccctgggtggacacagtgagaaagttccatctatgaaccaggaagcaagtcctcaccaaacaccgaatttgccagtgccttgatcttggacttcccagcctccagaactgtgagaaagaaatttttattgtttataagccacccagtctatggtattttgttatagaagcccacatggactaaggctcccaagaagataaatatgccaactgttttctagtgccttcaggctggggcttcatggaagtggtggggagcctgaacgtgcgctgcggatagggttttacttcctgctacccatcaaccatgggataatgcctgacaaagatgcgaatgaccccggaaatgtgagtgaaggccatgtaattatgtaggctttcactccttctttctcagccgattcagctcttagccagattctcttgttccatcaccaggttttatccctgctaactttctttccccaggaatgattttcattgagatcgtagtgtgtttcctcaaaagaagactagattgtaattgggtgtccttagatgtagaacaactctcctgtttagatttcaacatatatatctttagctttaatgtgtgtatgagagagagagaaaggagaggaaaggagacgagaggagaggagacgaaaggagaggggaggagagtggaggagagggaaagtgattaagagagagaagatgtgaaaacttaagcactggccgggtgcagtggctcacgcctgtaatcccagcactttgggaggccgaggcgggcggatcacgaggtcaggagattgagaccatcctggctaacacgaaaccccgtctctactaaaaatacaaaaacttagccgggcgtggtggcaggtgcctgtagtcccagctactcaggaggctgaggcaggagaatggcgtgaacccgggaggcagagcttgcagtgagcagagacggcgccactgcactccagcctgggcaacagagcgagactctgtctcaaaaaaaaaaaaaaaaaaagaaaagaaaaaagaaaagcactgagctaaagtaaagaaaaaccactgggcaggacatggtggctcatgcctataatcctagcacttcgggaggccaaggcaggaggattgcttgaacccaggagtttaagaccagtctcagcaacatggtgaaaccccatatctacaaaaaaattttaaaattagtcgggcgtggtggcacacacctctagtcttagctacatgggagtctgaggcaggaggatcgcttgagcctgggaggtcaaggctgcagtaagctgtgatcacaccactgcactcagcctgggtgacagagtgagaacttgtctcaaaaggaaggaaggaagagaaggaaggaaggaagggagggagggaagaagtgacggaagaagtgagggaaggaggaagggagaaaaaaaaaaggaaagacctggattccaattcttgccctatttctgatcagatatgagaacttatgtggcagagatcagtcagctggttaccagaacccatttcctcttcctcctggcacacagatctacttccacccctcctctgcagttatctgtcaccttaggattacactttggctgatagcatgtgagtagaaaggatgtttactacttctagctcctgcccacaaaacttttcactctctgtgttctttctccgtcctcgggttgattgttaatagagaaagactgtgggagttacgggttaaagatgataaagccactggcagccaggacccctgaagatcacatggagcagaaaacacacacacacacacacacacacacacacacacacacggacacacactgccacactgccactgatcagattcgacatgaacaggaaaggcactactattatgctaatcctctttaattgtggggtttctctgttacaacaactcatactgctggagctgaaatgtgttgcgaagtcattttaacctcttctgtttctatagctgtgatgtaggatttgctttttacaaagcttcacttaatccacttgagattgaaatgtggtgtgtgtaaaaaagctttccttattccatgttcttttccagcccttccctgggcgtttgtacttagttgcagtaacagtttaaatataattttacattagctctttttcacttagcacaccagaagcatttttccgcatctccacagtcttcataattataaatgttaatgactgcttaatattccatcaagctgatgcactgtaattgtctaaaacaagtgtgagatgttgctgttatatcctgctttgagaaaatccaacttatcaagacaaaaaaattctctacaaggggacttttatatattgagtgccttacgtttccaaggtataatttaaattacacaaatttaataggccaggcgtggtggctcacacctgtaattccagcactttgggaggctgaggcgggagaatcgcttgaggccaggagtttgaaaccagcctggtcaacataatatctctacaaaagaaaattttttaaaaaattagccaggtatggtagcacatgcctgtagttccagcttctggggaggctgaggcaggaggatcactggagcccaggaatttgaggctacagttaactatgattatgccactgcactccagtctgggtgacagtgaaaccctgtctcaaaaaaaaaattaatagaccctcagtcacctactatacagagcaaagtacttgtattatcactgggaaaaaatttatatatatatatatatatatatatatatatatatatatatatatatatataatatttgtcagggttgtctgggggacagaaccaataggatatatatagatatataagaggggatttattatgggaattggctaacgtggttagggaggctggaaagttctgcgatctgctgtctgcaaacggaagacctagaaaagcaggtggtgtgattcatctgaatccaaaagcctgagaaccagggaggccacatatgtaagtctccagatctgaaggccccgcagccaggagctctgaagtcaggaaaagatagatgccccaactcaggaagagcgagaatttgtcctttgcattctactcacctttttattctatttaagccctcaacagattggatgatgcctgcccaccttggtgagggcagatcttttttacttagtctattgattcgaatgctaatgtctcccaaaaacaccctcacaggtatacctaggaatgttttaccagtgatctgggcattccttagcccagccaagttgacacataaaattaaccatcacggatttatacctataaagttggacatttgcactcagtggctgctggttgcagagaatcccagcttccctaaagcagacctcacccaggtgattttccccaagtgtcgggccctctccatctgttgtcccatctatgctgtgtctcgcggaggctgctgtgtctgtttcttagcataggatgagggagctgacacttctgcatgagctcagaggtcaaagggcagtttgccttgtcaggtggcaaggcacctgggctttaaggtgaacattgcacacggtccgcccaggcactgaggagtgtctagggggcagtgagggggtcctgcactcccgtgcactcacacttatatttgcatccattgtttttgtacatgctcatatttaaaaatttttgtctttattgcacaaacaagagtgaaacaatcactcagaaacttaccatagtaacagcccagcaatcaatggactgcttccatatactctgtttgcctacctccccccgactccccacccccacccaaagaatgtctacctagctgtatttgtctgagacagttttgttttctcctttggtcctgtaaccctctgcagggatcattgtcatgttgcttcacagtctcaatcttaggacaagattaatattgcaccatctacattctcaccgttggagtagtcactctaacaatttgcagaaatatttaacccagaattcaccatctggatcaaaattctgacaatttgcatgtgtgtgctgggaaaaacatttaggtttcgtgtgaactcagattagaggagcggaaggagctcagctgttctccggtcgggatggcaccatgtgttgtttaaatgtgtgcattatcgtgagcgtccatcctgtgttattaagtgaaaatgtcttccaagaaggatccttagcatgttgtttcattgtttatgtacattaccatacatgtttaatatggcagagaaggaaaacataaattgtgtctactactgtacagtatcttatagtgtacaaaatgcaatgagtgcccattccatgttaaataattaggtgatttgtgttttaaatgctttatatgatgtagaaatactttatgtgatgtagaaactgcttggtggaagcaattaagctttctaatattatttgagggaattgattggggtttccggatgggctgggaacacagtaatcttggtcctattcctaataatggaatacaggctcccactatccaaacttaccattttcaggaatgggttagatttttggtactgagggatgtctatatttatcggtatcctcgacttggctttgagcatcataagatcaggaacttaatgtactcatctttggatgcccagcacctaaccgtgcctggcatttagttggtttaattcacattattctgtgactacaccaatgaacagatgtgtcacaatttatcaaaaattgctcctgttattggataaatatacacttaattttcttttctttgtttttcttttgatggaaaattaggctttttgctgtctgtgaagggcatagccaaggaattttgatgcgtgttgcaaggcacaccaagatactacatatatgtggtcaaagctctcctcttctccccagctctcacaggtctggcttagcccaatggtattgagtccagactcaggaggacttagttctcttcataaaaagttgatcacctttgctttctcctttgcatgggcaataaagaagtgaaaaataaattcccagtgagcttgcattctgcttgggaacaacatagcacatccattttctagagagctgtccagtccccatttgagggctgctagccacatgtcaagcaggaacccagagtataaccaggaaaatgtctgtggtagaccccagtgattcatgcctcccatctccacaccctcctgtagtcccctcccacgctgattctggactaggccacatggcttggccagtggaacacatgcaggcttgcacgtctggaactctgccacctaatttaggatcccagactctcctactggagacacaggtccttagtgacagtctgcaccaccattcagacaagtcagtagggccatcttagatcatccagccctagtcaagccaccagataactgtacccacataagtgacccctggcgagaccagcaggagaatcatgccaatgggccaatatacattctgacccacagtttcataataaaataaaatggttgtggttgtaagccactatgtttcagagtggtttgttacacagcaataaataactaatatagtaggcataccatcaagtccaaagtaggtagagaagaatgtaaatagcagagcaaaacagcatgactggtggctgggaggcttaaaactgggacaggatcagagtcatgaaagaagtcaaagaaatggttcagaagtaaggctgagactgacttacaaaagctgaaagtccctttaagttggtgtttggtgcattggcaggggcaggtatggtgacttaaaagagccatgctcaacaagatcaagcacaacacaatcacgggtcaccccagcagaccttagcgagtctagccatttctttggtggtggtcacagtcatgcttcagcccagtttccacttggacaaatggtacatattttcaatgagatgaaaattaagatacaatccatgtgctcagagagtgatcacagctctgactaaacactgtgccccaaagtgttgaggaattgggaaaacctagctgagttagtggtctcttttctgttacaataaagctcataatgaaaattagccttctttgttcttccccaagtctttctttctagacgaaactactttcaactgttttaacttccttactgttaacttccatatttctagatagtatggtcagactgttatttcttgacttttaaatgtaagatattatctactgacttccttctatgtaagatgaggattgagctctcttacccttctcccatttcctcatccttccaacataaatatattttgggattatatcaacattcaatgttacttaaagtgaccttgtaaatattttcacaactgagccatgtttgatttgtatacttatgtttactttactgtttttcctgaagttaataattgccttgaatttatttatttctttaaaaatgtttcattactcaggactgtagtttacattacgattctttgtgttatacagttgatgggtttcttttctttcttaatttctttaaaaaatagagatggggtcttactatattacccaggctggtcttgaagtcctgggctcaagtgatcttcctgtctcagcctaccaagtagctgagactataggtgcaaaaaagccactatacctggctagtttacaggttttaacaaatgcattatgccacgtatccattattacaggatcacacaagatattttcattaccctgaaagcatccctgtgttccaccaattcatcctgcctccatgagccgctggcaaccactgatctctatagttttgccttttctaaaatgtcatataattggaatcatacagtctgtagcattttcagactagcttttaaaatttggcaatatgcatttaaggttcctccttaaatgtgaagggcatagccaatgtggcttgatagctcatttctttttattggtgaatatttcattgtctggatgttccacagtttgtttatccattcacctattcaatttgctttttttctgtgtatctatcactaattcaatactggactctccaacagagccgtaaagtgtctttaaatacatcaagtaacctatatgttctatttttccccaacaagttgtcatccactgctccatctgagccgactgcccagtaaatcgttctggtagtttcccattctgtcatccaggtagtccttttgcctgatttctgagtcgggtcttttgcttattggatctcatgtctttttctttcttggtttattccttcattttactggagtacatcctctagtcacttccttggaaaagatatgggaaataattttgtaaaaaaagatttggcaggtctgcaagaaatatttattttatcctcacagatcaggcttttctagacttaaataagtcccagtagaaaaacgtcaggttgctggtggcttggcataagcatacttccaagagattccggaatggttggaattctattatttcttctctttttggtctaattttttctactagcttgaaagccttctgactaatagccccccccacccacccccagctaatccttttgtgaattggtttgaattggcctcacttcattagttgagcatgggaaatgttaacttctgtacagagatatgtattatagcataagaatggttatggtcacttgttagtatttctctccccacttttggattgaaacaattacagaataattagagcagagactatttctggcaaataaaacagttaatagttggaaaggtatgttttagtgaagattgtttataaacacacctcttgctgccaggatcttaaagtctaattaattagtatcagcccagcctgcctctcctcttctgtcacttgctttcatcttccttcatgtacacacacgcacactcacacgagcacacaccccttgttgtcttgccttttcttttcctctttatctcagtctgcacaagtttgcacacagaattggcttgcctcctagctgttttgtccccacactccatcaaaaaatattttctgcatctctaatttcatcaagatatgcctgactgagaatgtcaaaaccactgagcagaagtgtttaatccaaagttggctccgccggtgatgatcagctgaggaaacaacctcgaatttttccctcattatttgttaggatgtcagtttttcactttatggaataggttcacatcctgcttctcaccccctgccccccactcttcattgggcagaggcctcccactgatttccaatagagctctctgcacccaagaaagacacatggagaagaaatggtacctggccgtctgtgggtatgccaccttcaacaaagatgtccataagcagacagtcacttcatggtttcttggacaggcagatcctggccatgttcatgtaattccataaggtaaggctggagaggctgagctgcccacttaacaagcaacaagccctgggggagtctgggcagcccaaggtagaactaggggtggaagatccttgcttggccctcggatggctgtacgacgtcaggacaggctgttaacccctctgagcctcagtgccgtcctctgtaaaatgggaataatatcagctacctcctagggttgctacaaggataaaaaccaagtaagtgcgtgtgaatgccctttatcatgaatgagaaggtgccctgtaaatgttgcttattagctgaccttagagataagaatcaaaatgacacacttttgttccaggtagtttttcccctttggcttagtccccttttttatgagggatgatctgctgtttaaagcatttattaatataaagattatgaagggaaggatttagaatgtaattagtggggaagggggcctgcttctctgggatgagaacgccatgacttgttggctcagtacagcacactggtaatcttgtttcctgaggctctgcacacgctgagagcacatcgtgctcacaggcacacttagtgaatatctgagaatgtggtgagggagaacgtgtgtcaggaactgggcaggtgggcggcacagattgccattcctgcactggccgtgattgtagtaagtccctcatggacactggtagaacccgaatagacatcatcaaatggatgggtcttcctgcccgctgtttcagtttgcctcccagtcccctctctgcccaccatccgcacaagttgcagaatctgcagcctcaccccactggacaaagggctacagatctgccagtatatcgtaactcacatggtaggcagtggcttatgggatctttctagaagggagaaggccagactcttcagggcctgaaggcctgtatttaaatttcttcacagtttggaagaaagctactgtgatggtcaattttaagtgtcaacttagataggctatagtacccggttatttaatcaaacactagatgtttgattaaaaggaaggtattttgtgagtgtggtcaacactacagtcagttgatttatgtataggtggttgccctccataaggtgagtgggcttcctctgattagttgaaggtcctacaagcaaaactggggtttcctggaaaggaaaatctgcctcagaaccatgacatcaatgcctacctgagttttcagcctgccagcttgtcctgcagatttcagacttgtcaatccacagtctcatgagccaattacttaaaataagtctatctatgtatctgtgtatctcttatggatcctgtttctctggacagccctgactgatacagctgctctctatccagagattacctttttctttgactctattgcaatccaactctcagcagtccagaaaatgaaacattttcttttcactaggaaaaccaactgtgttactggaacaacaaaccaggcaaatgaatcccaaatcatagtccaactctgatcttgaaatctactaagctttgataaaactaagatacatattttatcttttaaaaatcttgatccattttacctcatcagaagtggggagttcaaatcatctgcattctaatcccatatctgtcttggttctcatcactgttcagcctctccttactccctgagatgctcgccctgttggaacacatgccccttggcgaggaatctccatacaccaccgagctggagttgtctcggggcccgaggcagtgggactcacgttgtaagctttaggtgtcaatgaaggtgtctttccttgaaagacactaaaacttgaaaaagttgtcatctcataattccaggtgccaagatcactcaggagagaaatgctcctccctgtttaagttattatttttatctccagggtcatttctggaacccttcatatacattttaatcactttaagtctgaatcacaaacattacaaggctcacctttggccattcccaggcagatgaggcagggtctgggttccgtgagtcatttaccacagactccagttggaagcagttcccagtggggttacgtgtgagccttttcaattgtccgtgactgtgttccgtatacacatatcgattcccctctctaattcccagagctagtgccctgcccttctgtctggcttgggtggagcccctgaggggtggggaaaggacctggcgccactgagcagacgtcccttaatggtaatcctccagtgagtcaatggcctccaaagagaccatgagcgtggtcttgttgatgaggaatgtagtcacagtcacacaaaaaagtccccagtctctgcctcaggaccccatgcatggcccatcatccccgctgcagaaagaaactggacaggacctccccttaggagcctgtcagcccttgtcagtaatcagcccaggggctactcagaatgactggaggcactcacatccaccccctaccaaccacactgcccgctctcagcccctgccacctggggagccccacaccagggcagggcaatcaagcttggcttctgcatgccgtgcaaagcttgccagcagccaagctcttgaaatatttatatttatacatgcaaggctcagactctcgctttgtcccgacaggcgccatcgtatgtggggatggggtatggttcgggagggttcattcatcccatgctagcgtgcctacccgccaaggctcacttgcgcagaggaggagggatctcaccagaatagtcaaaaagttggccattgtcatgaatcaaatccatgtgttggaagaaatatacattagaaaattgcatagtctccccttccctttgattcagagattttcgtttcatttgtgcacagggaagagttgaaatgcccctcctgaggggtgcccttctggggatgcaggacccacggattgcagggtgtacaaacacaatatatgtatttattttcaaagacaacatgaaataacaccatagagtttttgtggctacctgttctcttttgaagaactgttcaaaaactagatgatgggcaaaaactctatagaggggaaaggaggcaggaagagccacagtttcagctaagtcagacgggtgcactcgagactcaattagcaattgttcccatatatttcaacacacacaccttaaacacaggttttctgagtgaagtcagtgatgaaagcctgtgggttaggggaattttcccatggtagcgacagctgttcccacagaaacagctcaatttatctcagagatgaaggtttcactagcttgggcctctcatcaaattgcatgcatgggaattatttttaagcactctaaaatggtatcatttcctagtggcaaattatttgggtgtattttgaaactaattaaaagggaaatgtcctattttgtaaagagcagcatttctacattttaaaaatcagatgttctcagtggggagcagggttttctcttcgtcagtgttggctattgctaagtgcgtcccagattgaaaacctaaatgaaataactacaaggaaaggcatggggtaagcttatgttggaaaaggtggagggagacacacatatataatacatacaccatttatctgggaatttagaaagccttttcatgtcatctttttttctttcttgctcattgcttgttatttcactgtgagccttgcaaatatggagggcggcagaggtgccaggctccatcacggtgtccaaaaattggctttgtacatatgctgaattagagattggctggcagaagcagtgtgcagaccctagattggcagggattcctcgtgacggaagacagggctatgaacccacgggatgtactctgaagccagcagccatgcaacgtgctgcatccccacatgccaaaacctgttttcaaatacattcagaatctgcatcaggcatcagatcccacccaggtaacgccctccaaaactcgaatcccctttcctttctcatgaggaagggaatgtgttgaacctgtcacaggacagagatttgaaatttttcacccaaggctccaggtcattttagtcaccacctcttgtgaataggcaccgtagcatccaaggaggaaggtaggaatcttgcagatgcaaaccttcctgttttttttcttccttggaaataagcaaactgccaaggcggttctgatgcaggaagaatgaatgcagtgaaggaacacgttaagacagccggagcagggaagtccatgccaaaaagatccgccatctggggcttttttctcactgtgtcaaccagaaaatgcctctctcatgtacaagtagctagttggtggctttactcttcccaagagatctactttattttatgggcaatgatgagttttaataaaagcagggttgttgttgttgttgtcattactgatcttgggtttctggtttatcttagaattgagcactagaaaggaagtgaggagaattattttctagaccaataggtgcttttgactcaaatgatgacattggacacttctaggaacctttaaagtagggacattagctccagttacgtcacctttcctctaagggtacagtgaaggatcaggagctgaacaagctgacctcagtcccaatcaactccgaaatgtgacagctgattagagccttgcagcctttcaggtactgtttaatcatttactcgcttgagtgtataagctccgtgagagcggagagcctgtctgcccatagcacacactcaggaaatattgttgaatatgatcattgggttgatggtctcacggggtggcaccaagggggccagcatgtcaagcgtaattcacaccggagcaagctttgggtcacattctgaatcatatgtgatgtagtgaacaagctctcggatgggcttcaggggatgtgcgttcaagtcctggctctccccccggcatcagagtgaccttcagtcatttgttgatctctctctcggacttttgtctccttgtttctaaaatgactagataattgtagagctttcttcagccctaaaattctgtgattctgaaactcagccagtcatctaaaaatgcattttctgcatgatgaaagatatttattaggcctaagtggaagagccagcattcttgatgaaaagaattactctatgcacacatcctaaggacagtggtttagatcagtgccctcctggtagagatgaacaacacaacgggaaggacaggcactgacgcacataaagatgaggaggctgagcgtggttccaggcaccactgcggtatagaaagtggcacctagagccagccaaggacataaagatggacttggagacactggagcagtgtgggtgcccctcagcccaggaatgttgcagagaggagtcatatgtgagattagggttgccccaagttacctctaagttctgtccaactcaactactctgtgagtctgtgacagtccctagctctgtgtcctaggacacagtgacacccctagagatcttaccaaagacctcaaatagtccaggcactgttcctcttaagggatgtagagaggagagggagagatggaaaagggagaactcacctttgttaacatactgctttctaataactcttttaaagaagtgttcattccattgttcatggaatatgcttccagtcgtggattgcattgaaaagataagtccatgtcctaatccctgggacctgtgaatgtgaccttatttggaaaaatggtctttgccgatgaagttaaggatctcgagaaaagaccatcatggattatctgggtgggcccaaaatccaatgacaagtgtctttttaagagaaatcagagacacacagaggagaagacagacacagaagagaagtcagacacagaagagaagtcagacacagaggagaagacagacacagaggagaagggcacatgaaggaagaggcaggggttgggtggcggcagctgcagggactgccagcagccagcaggagctgcaggaggcaaggaggatccgctagagagggactgcgccctgcacacacctcaagtccacatttctgggctccagaactatgaaagaatacatttttgttgttttaagctgccaattttatggtcatttgttatggtggccctaagaaactaatacacctcagatatattatcattgataccattaatcaggagctgcaaggtctcttttcctaattaacatcatggttgttcttactaataataagaataaaagaactctcagggaggcaggtggagggagagcatcaggataaatagctaatgcatgctgggcctaatacctaggtgatgggttgataggtgcggcaaaccaccttggcacatgtttacctatgcaacaaacctgcacatatatcccggaacttaaaataaaatttaaaaaatgaacaaataaataaataaataaaataactctatcttaaaacacattaacaatattattgaagaataatattagatcttttgaagtaagcatttttttttgcccgtgtaatagctgtctgtaaatacccgcttcttgagtgaaccaccattttctttcttttttttttttttgtagaaggaaacacacgctaccagaaaaaaaggggccccattttgatatccctccatccctggccttgttttggtaactttgtttctgtaccagatccacactcaatcaacctgtctggtttagggtatttttagcttcatagagcaatagtatcaatacaattctgctgttttattatacatttatcaaacagttcactatctggtcttttggccagaatttcttggcctcttctcagagctctgtctcaatagatcttttgataactgttttccaacacagtcttcatttcaatgttagaatatgatgttaatgaatttactagcttccagtcgaggatgaatagcttacagtgtttgcggcaatattggatgtatttatttccaagggaatgatttttaacagcacattgtgttcttatttgcttttcacaatccagttccagcatctgagaaactttgctttgatggttgactcccattagggaaacactgaaaacaattatcctgtagtggtctcggttcttcctggcagctttgcatttccatggtgcgagaccactgggtcgtaccacttgtttctccctccacgtcctcaaatgatctcttaaaagaacccactttagacctcattgttaccttccctctacttctttttcttcttattgaattcaattcaacaacatgtattaaatacttacaacctggtacccaggtagaagaagccaacgtatagacagggcatgtcattggatagtgataagatctgatggggtgagtatctaggcaacttagactgggtgtggggttgaaccagcatatttaaatttatgtaaaaactgagaaacaccctgaaaaggacttttattgttggacataattctctagtcctgaagttatcattcaagggagttcaagaactcatcccttaagtggactgggcaagctggccatttaccacttgtcacagttagaattaggaacttggctttcatattatccattggtgtcacagagtgggaggaaaacatcagtaatggatccataggaccaccagtggaggcaaattgaatttgggatatgttatatcaaatctgttaaagggaaaaaaaagaaagaaaaggaggggagagaaggaagaaaagaaaaaataaaagaaaaaaacccaaaagaattcattatataaccattatatgttaatggtacagtttaagagattttgaagtattgtcatatatcatttcattaagtagtatatacatacatacatacatatatatatatatatatatatattttttttttttttttttttttttttttgagatggagtttcgctctttttgcccaggctggagtacaatggcacgatcttagctcactgcaacctccacctcccaggttcaagcgattctcctgcctcagcctcccaagtagctgggattacaggcacctgccaccacacctggctaattttttgtatttttagtagagacggggtttcaccatgttggccaggatggtctcgatctcttgacttcatgatccagctacctcagccttccaaagtgctgggattacaggcatgagccactgtgcccggccagtagtttatatttttattccaccaattcttattcttaaaggaaagaaggattaaataagccctaaatgttatattacattagaatctttgaattgctgccatagctacataatggtgtggaaagtagtaaacccatttttcccaacttatgggaaagtacaaactaaaaatgagtgaatgaattaatgcataaataagtcattagaactctgccatcagagtcctccagtcacctcccccaacacatactcaaagacagaaccatccctgagtgcctaggtatttggcactgccagagcccctgagcaccaaatgtgacaggaagcggggttaccgtgttgcttttttttttttttttttttttttttagatggagtctcactctgtcgccaggctagagtgcagtggcgcaatctcggctcactgcaacctccaactccctggttcaagtgcctggttcaagtgagtctccttcctcagcctcccgaatagctgggattcaggcacacaccaccacacccagctaatttttgaatttttagtagagatggggtttcactgtgttggccaggatggtctcggtctcctgatatcgtgatctgcccacctcagcctgccaaagtgctgggattacaggtgtgagtcaccatgcgcagccctgtgttgcttattttgaggacacctgggcacttccagccctgcctccttggaagtgggagggataactggcgagagaggtgggcatggctgagcatgcagtgggaggcagaacaaagccagagtcccacaggtaaccttctggccagtgcctggttcacgcagctttaaggtgctccaagaggactgggagacccctcaggaccacgggagccttgggagaaaataaagtaatgcctgccaaggtgccaagccagtgtcaagcaggtgggcccaggaagtaactcagtctcaacctgcttatgccaggactcctggtgagcccacagcctgggagggcatacgagtaggtcctgtcccataatagattactcagtcctgactcatatagggggcttatgagagaaggaatcctaaggccttcccaggtggcctgcaggagcctcaaagtcagcattgcagggaacactcattcccccttcctgaagtttctttccttcaggagggagctccactggtgcagtgctgtggttctcccaccccagcccacatctccgcagagccagggtgatgcacccagtggctatcctggcatatgtagctctgcctcctcctttttccttcctcgagggtgtgggctgcccacaggcagtgtgactgattccctgctccccggggcccactctctgccacacaggatgttctcggtcctctgcagcctgatgataagtcagtctaactctatggcccagtattaaaagaccatgtggctctttcactcacttctgtcctcaacccagcctttatcagaaatgaaggaaatgttctaattctcctcctgctgacacttttgtcttattgttcaattggttcagaattttgacggtcaagaggtgatgtgatcgagatcctaagcaaacacctctaaactaaaacaatcatgtacacttacccccaaattctacctattgttcttccctctattgttggaacacacctccctcttcctaacacacacagtgagaaagggaattctccaagatcagtaaaaagattgccaagtagtgccaaagcccagagcctgtctctctgtggttacctctttccagatgcttttcttgctcctgccactactctgttctcaccgtcgcctctaccctctatgagcggctgattcatctctgcttttgtgtcagcgtgcaggctaagctgctacaacagaaaagacacaaagcaacagcagctcaaaccaaatgaagtttatttctctctcacccaacagcacagaaagaggtagccgggtggtccaaggcaggtgggaagtgctcctcctccatgttcattcagagacccacgttgcgtctgccctgttgctctgacatcctcatctgcatggctgatgccggctcaccctaccatgtttgagttccagcatcggagatggaggaagagagagtggagggcaggtggcttccttttaagggttaaatgttgcctacaccacttctgttccattcgcatgctagctgcaagtgggtctgggatatgcaggctttaagaagtgccaaaactcaaaggaaaaggaagaatggttgctgtgagccatcagctgtctctgccacacccctgtgcaaccacatgtgatatctgcacatcaccctgcactgcatttttgcattgctctttattgcatttttgcatccccaggacctagaacagtgcctaacacagctgagtagttgaacagctgagtgaatgatgaaggcctttttcccccagcaagccaaatcccagacccaggtaagagtaaaacagaactaacagagacaagacttgaggatgctgtgaaggtatcactgtgcacagttaaccaggaagtccagggtaggtggtagattggcaagaaaatctgacagtgagctgaccgcccaggggccaggacttggaagacaggggaaggtaaaccagatgacaacgacaaggggcagctcagggaggagctgtcattagagaggtggatttcagggcttgagagttcgggatgaggcaattttgagaaaagtgaggccaaagtatgaccaagtcctcagggtgggtgttggggaacatgcagtcatgagatgggatttctcctggcgctgcttggagaagcttccagccgtgagtatgagggggacttgaaagggtgacacagtcagacagtgtggactctgccagggggagcgttggttggtgaggcgaaggaggacagagacgcagatctagaagatgtctccctctacccctggccctgcatacaggggagtgaggcgtttcttcccctggagagggtggtgacacaaagcaggacaaagccaagcctcagttccagcacacagagtggacagtgttccagggagtggctgcttatgtgagggaatttgtaaccttccagaagctacagtgcagtaaggtaggaggtagggccaggaggaaataggcccgcaccaaatgcaggtgtatgaagaatggacttaaccattgtcacagtgtctagtaactaccgattcagaggacaaagtcccagtttcagggctctgcatggtgatgccacggtgccacagtgtgatggattacagggatctgttaaaatacttatatgcactttcctatgtttaagctttttctataaaaagtatatattgcttttatagtcagaaaacaatgccacttaaatcattaaattcttccaagatggtggtgctagagagattatttcatttctgtggtccttgcttagctgtaaaaggagagttggaaccaaacaccgcatgttctcactcataggtgggaattgaacaatgagaacacatgaacacaggaaggggaacatcacacaccggggactgttgtggggtgggggaagggggagggatagcattaggagatacacctaatgctaaatgacaagttaatgggtgcagcacaccaacatggcacatgtatacatatgtaacaaacctgcacgttgtgcacatgtaccctaaaacttaaagtataataattaaaaaaaaaaggagagttggcctcagaggtccccacttaatgcatatcattgtcttcctgctcagctctcataggattcttgccttcagtgcacaggtgggaactggaaaaataagggtcagggccaggtgtggtggctcacatctgtaatcccagcactctgggaggccaagacaggaggatcgcttgagcccaggagtttgcgaccagcctgggcaacacagtgagatcctgtctatacaaaaagtaaagaaaaattaaccaggtatggtggcacacacctgtaccctcaactaattgtgggggtgaggtgggtggatcgtttgggcctggaaagttgaagctgcagtgagcaccgtaattgcatcactgcactccagcctgggtgacagagcgagaccctgtctcgaaaataaaataaaatgtttaaaaaacagtcatgatataggtcaccaaccaagagcagaaattatcatgatttcaagttgctttagccacaatatttgccagtagtgttgcaagtagaaatgtcacctagtaaaatggagctacctcgtggagatctgtgtgatgggaaaatgctctgtgaggattcatggcacgtgctcaaggggctgctgagttcctcttctcaggcaggtctttcttctctgtgctttgggcactgtttgcccaataggcgaggcatttatgtgtgcaccagcgcagcagcttttcaaccctggccgtccagcagggtcacaaggggagcctttagaagcacgtgtccgagccccaccacacacccatcaaaccaaataaagtggatatccccaagaagagtggagacagaaatctctacataccaaaacgtgtactaagcttcttaaccataaatgagaaacatttttgtaaattacaaatattattttttacatgatatctctggttttccctcctctctgtcaagtggttttaagttctcaaaatcccaatgcttttatatctgtgaatgcttcttgaatacagtttaaaaatgatagtttttatctattcttcaaatatgcataagtaattatatattagatgtatttataaaggtaaatattaagtttcagctaactttttaaaacataatttttatcaaaaatgacaaagattgaaagcttttatatttaaaactaagggatactcaaaacattagatattttgcattttcctaccataagatgcatagtaagttgacatattaggccagcaatatgttatttttattcaaaaagaagtaacaaaagtgagtatctctactgtttggaggaggggggttctttcgagataactgatcagaggagggttatacagagaatgttggatgttaaagccagaaagaaccttagagtttatcttgcatttgtagaaactgaggccccgatgcctacaatttttatctcagaaatgccaccgtgtgtggcatatttttcaaggcacataaaaatgggttgctgaaaaattctcaatccatgtattgtttttcagcttcagaagaatgctaacactgacttttgttaaatgctgtaatcttcccatattactataaattgtcaaacatttcacattctttttctttttttgaaacggagtctcatgctgtcacccaggctggagtgcagtggcgcaatcttggctcactgcaagctccgcctcccaggttcacgccattctcctgcctcagcctcccgagtagctgggactacaggtgtccgccaccacgcctggctaattttttgtgtgtgtttttagtagagacagggtttcactgtgttagccagtatggtctcaatctcctgacctcgtgatccacccgcctcggcctcccaaagtgctgggattacaggcgtgaaccacggcgcctggcctacatttcacattcttaaaagccttttggaaaactgagcaactggtattaagaatggttagatttgagaagactaccctaaagaccatattgttaagcatattgagcagatgaagagttacatttgtaatcaactaaacctttttatcaatctccatgtgagtcaacagtgtagccagccagccaggaattaatgcacttacaggtggggcatagcatctggaagagcagtgggagcgcctgctcagagtttagaaggggcatcaccaaacctgggtatgtccagagcagggcaactcaagagggcagaggatgttgaaagtgtatcagagggtttcagagagacaatgatcagaactaggagggttcgaagacagaagacccagggaaacatacggaccacacttacatatctgaaggtccatccagtggctgtgtttacacagaaacagatcatcagttgccaagaggatggcagggctcttgccttggccagagctcctgaggtaactatgaagactcttcccaactccaagactctgattctgtgattctcactccaggacctaacctgctgatgatgtttacaaaatacaagaaagaatcctagctatacgaatctgacagacatgaggaaataatgcttcgtgtgtgtgtgtgacacaccattgggtgtgtgtatgggtgacagagagacagaacagagtggtggggaggggcatggaattttaaaagattaatcttttaaaaattttttgtgggtacatagtaggtatatatatatttatggggtacatgagatactttgattcaggcatgcaaaaagcagtaatcacatcacggaaaatggggtatccatctccttcaagcctttatcctttgtattacaaacaatccagttatacccttctagttatttttaaatgtgcaattaaaaatagttaccctgctgtgctatcaaatacttggtcttattcattcatatttttttttgtactcattaaccaaccccacttccccacccacccacccgcactccccacaccccttcccagcctctggtaaccatccttctattctctatcttacaagcatatagttcccaggaagggtagctactctgtgccccaccccacgctgggaactctgagggcttcaaacacagtcccaacctcaatgtctgtctcatctatctggttatagagacaagactaacaaccctgcgatggtcagagacaccaggagacctcgggaactctgtccttgtggtcctcatcccttcattctcctcctgagcccttactctcctttccttaaaaaaaaaaaaaatcactatatacaattcacccatcttaatcataaccacctccattcaaaaaggttacatatgcaggccaggcacggtggctcatgcgtgtaatcccaatactttgggaggctgaggtgggaggatcactgggggccaagagttcaagaccagcctgggcaacatagcgacagcctgtctctattaaaaataaatttaacaaaaaccaaaaggccagatgcagtggctcacacctgtaatcccagcactttgggaggttgaggcaggggaattgcttgggcacaagagttagagaccagcctaggcaatatggcgaaaacctgtctctacaaaaaattagccaggcgtgggggcatgcgcctgtagtcccagctacctggaaggctgaagtggaaggatcacttgagcccaggaggtcaaggctgcagtgagctgtgatcgtaccactgcactccagtctgggtgacagagtgagacccttgtctcaaaaaaaaaaaaaaaaaaaaaaaaaaaaaagggttacatatgcatatgaaaaaaggcagaaaaccgtattccctactgccttcttagttaaacagtaccaaggtagtgtttgttgcccaaacatattaaatatggcttatgaagtcagcttacacgcagtccagatttacatccttttaaaatcatttctctcacctaaaccataacagcagcagatggacagaggaagaaatggaatgtggtcacattccatactaatattatgaagtactttcacactgcaatgagtaaaggaccatctgcaacctatagcctgtgtttctgctgagaaactgattccggacttaaggtttctaatttggaacaaaagcactgagcaggttgctctttgtaattttttatcgagaggtggagagcatactaggcctacctggattcctgaagaattcagcaacctgaagagcacggcgcacggaggaaagtagactctagatctttaagatctgatttcatacaaaatgagaggtctaaaactagatgccataggagagaaaaagtaatacgttttcctcacacatcttaaggttcgtgactgaggtacctataatgaaagacagattaacaggagaaaaacacatacatactttttttttttatttatttatttttaagacagtctcagcctgtcacccaggctgaagtgcagtggtgtagtctcagctcactgcaacctccgcctcccgggttcaagcaattctcctgcctcagcctcgcgagtagctggtactacaggcgcgtgccaccacgcctggctaatttttatatttttagtagagatggggtttcgccatgttggccaggctggtcttgaactcctgacctcaggtgatctgcctgcctcaggctcccaaagtgccggcatcacaggcgtgagccactgcgcccggccacacacattactttaagctttacgtgacaacgtgggaaccttcctaaataagacccaaagaaacaggaacacctatgtattttttttctttcttttcttttcttttcttttcctttttttttttttttttttctgagacagggtctcactttgtcaccgagggtggagtgcattggcttgatctcagctcactgcaacctccacctcccaggttcaagagattctcctgcctcagcctcctgagtagctgggattacaggtgcacaccaccacacccagggctaatttttatattttcaatagagacagggtttcaccatgttgaccaggctggtctccaattcctgacctcaggtgatctgcccaccttggcctccctaagtgctgggattacaggcgtgagccaccgtgcccagctggaacacctatgtatttttatgcttagatttgatgcaagtcgacagtcgtgtagaagtgtgattggatgagggggcatgatctagcagtaataaaccgaggggaatttggcaaggcctgtttgttcaggttcttcttggcatctctgtgtcttcaaggataaggatgttcctttcctttagggatagagagggcacctctggaatgaaagtttttgactgctttggggagaagggtgggggaaaggtgagagaaagaccttcctgcttctgctgttttctcaaatgtacattttgggtagtgtgtcctgaaccccatcaatgaacaggctgcctctcgttgtctgtgagttgatttgccccctctaggactctctcctggtgccaaaagactagcttcctgttctttccttttggtcaggcactagggacacaagagctataaataagctaccttcccagtcctcaatgtggtcagagtgctggtgtaaggacatctggttactgaaaacagggccaacctaatatgaactcagaaccaaccccaagtgggtgtgcacaggaaatgggagtttaaatctgtacagcccttttttttaaaaaaaaaagcaattttagtttacatgttaaaatagggatatattagccagaccatgtggtgtcagcctgtggtcccagctactctggaggctgtagcaggaggatccctcgagcccaggagtttgaggcagcagcaagctgtcatggtgcttataaatagccgctaccctccagtctgggcaacatagcaaaaccctatccctttgcggggggaaaaaaaggcatttttttttaacctaacatttattaaccacttacgttatatgatttcaatactcaccaacccttgagtcaagcactattcttatccccatctttcacatgaggaaactgaggcacagtgaggttaagagactgtccctgtctcgtacacaggcagccatcagcacagtgaggacttgaagcaggatggcttgcaggaggctgtgagagttggagcctcatggtcattcctttggagcctcagtgagcaggtaatttggcctggcatttccacttccaggatttgtcctaagggatcagtcagacaaaaggactctaagatgaatgttctgggatatttgttgcagctaggtttatcatctttcgggaatcagggcaactgtcacatccccaaagaagctgtcttgccaccttgtctcagtcgctacacccccatcactcctatcccattagttaattctgctatcttcatagtttcacagtctacaattgtttattggcttacttgtttcttagctgttttcctgactggaatataagttccatgtaggcagggagctgttctctccattacctaaaatggtagctgacacataaagcatattcagtaaatatttcttgaatgaaatgaacatattaatggcaaacagctggggaaaaattaatctttttttttttttttaagacagagccttgctctgtcacccaggctggagtgcagtggtatgatcttggctcactgcaacctctgcctcctggattcaagcgattctcctgcctcagcctcccacgtagctgagattacaggcgtgcgccaccacttctggctaatttttgtatatttagtagagatggggtttcgccctcttggccaggctggtctcgaactcctgacctcaggtgatctgcccacctcggcctcccaaagtgctgagattacaggtgtgagccaccatgcctggccaaaaaattaaatcttactccatagggaattggcctatccatgcaatagaatacttggaagtcattacaaatgattgtgcggatcatgtcgagcataaacagataccctgcctgtggctgagtaaaaaaggccggtgacagaatgcatgtgcagtgtggttgccgtactggccggggctgctggcagctaaccacagaatttcgtttactgagtgtaagcagaaaacaaaacagtttattacaggctatcgggtaactcaccgaccctcgagggtgtaaggaagggttctgcagacaaatgcaagattgggagcccaagatgggagttctgcctcacctcaagtgctgcctagttgtctggattccagagaagtctcctaacctctctgttcttcaggcagatgtggataataaaatctgtgctgtccacactgcaggactgttgtgagggcaaatgagatcacaggcatgaaagccctttgaaaagttagaagaggactgtgtatatattgacatcatcgttatcaggtgattttgaacgttggaacacatgtattttgtccccaagcccctggtgttggcacaccattgggacaccattggtcctctctgttagctgcctgcacatcactcagtgttaagatccccctggcagtggtctggataaaaaggccggtgattctggcagtcgtgtttgctaagcttgtcctcaaatcatcttcggtgtcctcttgtgacttcagtcactctccctgtggggtgacctgtgtctcagcttcgggcctgcccttctcttgaggcacactaatcttgccatcttcgaaaacaggctgttctcatctcgggtctacactgtggcagccacaaagctcggctttttccctgaaagtcttccccatagcctgagagctgacacctagcgcgtgggcattcaaagtcactgtcaaccagggcttcatgcatggttcaagccattgactaggtatcaaagaccggattcaatgaggttttaaatttccgtacaattccattttttccatcctctttttatgttttttaaaaatccttcattgcctacctaccatcagaggaaaacagcgttgtgatatgatgggggattttaaccaggtactaatattgtgaaagagaacgttagtggtcctgaaactaggcatatgttgtaaggtggggtgattttcccacttcctgtatgtccagaggcccttcctggcagaacttccagcccaggagactttcatcttcatctcgcatgaaggatacaatttcgttttgacgcacggtttagagaagccgttgaacgtccacacaatctgttatgctaaatcacacctggtgtctgcacagagaaggctctggcaagagtttttgccactgggaccaaggcctctgactcagaagccaaaacatggcagtgttgcagggcgcctggctcaacggcacgggaaattaacctgcttgttctcacgttaaatgctttatgaaaattcaccgggcgcaaaaagagggaagaaaacccaagtggttgtgcagtgcgcctgcctggcaccagtgaaggaatgaagctgcggaaaaagtcaatgtgaagagctggcaggaggagaaggtggaaagcgcgatggaaatcaaatgcggtgccagccacggcattgttttattagcatttgctcgaggaaaacatttaattatagaagatcggaagctcccagtgtttgtgagctaggtgacatgacgcaggctctgccacttgctccacgatacacatcttcagaggaactgtggcacaccgcgacaggctgcgaagagaagccacctcccgggggcctggtccttgctggggggcccttagctgtaacagcctctgttctccagcgatcctcagtctgccttttttaaaaaattaagtgtcctgctggccgtccttcttctccttcgttttctggtttttccacattatatttttcttttccttgttgatttttgaagaaaataaaattgacaaagaataggatggaaaagtactacccttaaaaatgcttatatatttgccacctaaaaaaaaaacaaagccatttttcagttatagttttctttgggaaataattaggaagcaaaacaaccaagaataaaaaaaaataaatgggggagcatgaggctgtagtgaactctgtttgtgcctgtgaatagccactgcactccagcctgggccagcagagcaagaccctgtctctacaaaatacataagtaaaataaatgatctaaaggactcagtatatatttaagcaacagaaatgaaaacatgcaaaggtggaaccaacattacgaatgttgatggatattaccaatattaccaaatattgtgtggagatttttttttttttttttttttttgagacggggtcttactctgtcacccaggctggagtgcagtgtcatgatctcagctcactgcaagctccgcctgtgtggagatattttttattcctttttgttttaaagccctgtctactttaaaaatagtttgtgaaaataatgatgcagtatcacgtacctgcaggaagtatttctttgtgttccattcctgccatcacatagctgattgtattacctgatttcttcattcgtgtctgccaggaagactaattaatgtgctgctgaatataaagaatccttgtttgggatgctgccctgccacacaaggcagtgcttcctccagaagacaagaagtcaaggactggcttctgccgctggctgaaattagcattggctcagtttgtttagttgcaaggctatgtgtgtcttgtcattagacatttatacttctgtggataaactttataatctacttatggagacaagattctttatgtcagcaccttagagaagtgttgtagaagcagttggcatgcagacaggagtctcctacagcaacgtgggcacagctgagtcggtcttaacccaccttagggcatcctcatacctgcccaactcatacctgcagaaattgatgatgggcagggaaataagtgttttcctccacagaaatgaaaaaaagtttgcttttttttaacaaattggtttttgatatctgtgtgaaggggacaatttggatcggcttccagtaatgtgtatcaggtcagctggagaactagagggagtcactggctgaaagatgttgtgaacatcactctaaactgctcaggccagggacaggtgacacgtctgttatctgatgtgtatctggaaccatggtaaggctgccccattaaattatgagccaatcactcttgatttaccgttaaaaagagtgaaaggctggcggaccctgccctgcacaggtaattcatggcacctttggaaaaaggcacgttttcatcctcataatgaagaaagctaggtacgaggtcctttgatgacactgttcccttttgcttgtttacttttattctcccacgcagactgagacccagcaggaggcttttaaaccaaaacagttaattacctcctctaacccggagaagtggggaaacataaatatagcgagttaagagggagagagcagctttgctcctgactgtactttgtaccagtcggttggggaaggcagctaccttctctttcctcactgagcccgggctaagcgagaccaattagaaggcacgtgccagggagtgggtccacatgctaccatactgttgggcttccagaattctttcagtgctctggagaggagcccacctgagaaacccacgtacagatacccattccaaagacaacattgagtagctttggggctctggaccctccttcgaaggaaggaactcttgggcaggtggagtgagcagggacccccaacttgaggatggatcctcccgaaggcaggcagggctgcagggcagcttctcagagatacttctcaactgagctgtgagtcatgacctgtcaccaccatggtcctttctccccaatggaacggagcgtcattccttgtgtctccaagccctgggctgcccctgcccttcagggctctccattgtctgcctgtctgtctgtctgcctgtctgtctgtctcctggttcaagctccctccctccatagcctcatatgtacaaatcatcaccttgctgtgttccctcactgttcctgccgctgccctgctgctgtcctttgcccatttctggctctctcacctcctctgcacttactgaaatcctgttcagtcttcagaggccacccgagtcccagactcccctcctccaacccccttctcagcttgaggtgccgtcccctgcttctaagtcccaagggccccaggatctgttccactgactccaactgttacttcacttctcattatatggggctttcatcgccacaactggatgataaattcccagacttcaacagggagtgatttatggatcttttccctatgtcccacacctgtccccagcacctggtgcagtggattgcatttaattaatccctctggataaaaagttttaaatgtaccagaccagcatcatcaggcagaatctgggcatggtattcaggaagttttctcttgggaatcacaaacattctttaaaaaagggcacatcccctgttacctaaatgccttcaagtatctggatgtttggccataagtacataaaacaaccagatgagtgattgtgtttttcagttttcctctggatccttctgccacctattccctgggacccctcggagacagtgggcaccactccccattcctctgcccacagattgtcccggctccctgtgccccttgctgccctgctagaaaccagaaattctaactttgcccctctgaggctgtgaaaacacagagtaaaagtgggaagagccatgagctagcagattccacaaccacagacaaatctgagcatggcggtggttaatagtattgggaaagatggctgagtaccgtggctcacgccgaaaatcccagcactttgggagaccgaggcaggcagatcacctgaggcttggagtttgagaccagcctggccaacgtggtgaaaccccatgtctactaaaaatacaaaaattagctgggcgtggtggcagtcacatgtaatcccagctacttgggaggctgaggctggagaatcgcttgaacccaggaggtggaggctgcagtgagccgagatcgtgccattacactccagcctaagagacacgtgagactccatctcaaaaaaagaaaaaagaaaaaaaaaacactattgagaaagacagtgtaagcttgtggtacgtaaatactctgtcttttttaaaagttgtgtgtagccgagtgtggtggtgcatgtctgtagtcccagttagtcgggaggccgtggtgggaggattgcttgagcccaggagtttaagaccagcctgggcaacatagtgagacactgtatctacaaaaaatacaaataattatctgggtatggtggtgcatgcctgtagtcacagctactcaggaggccaaggcgagcggattgctggggcctaggagttcgaggcagcagtgagccatgatcctgccactgcactccagcctggctgacacagcaagaccctgtctcttaaaaaaagtctgtgcaaagtgtacgtcaaagccacactactgaatcataaaacatcggcagtgcccgcccaccaagggcatcttctcagcaccagctccacattgtcctatgagtttgagtcagaggtgcctcagaggcccataaggatgcctgtcaaggtcttcgcagaaataccaaaggcctggcacatatagttaaggaaaatccaccaggaggagatggaaaaagggcaaggtaaagaggaggaagagaggggaaggtgacggatagggctatggcagcagagagccagcaccagccagttgccagtcagggccagggcaaggcagccaaggaggcagacagaagtaagccccttctttccactggagttttctctttcctgggaatttcattgtattttgttgaaaaataaggtgtgaaaatacaaaacaaaaatatcacgatccccccaatccacaccatatacaaatatatatactcaaaatgtattaaagacctaaatgttatagctaaaactattaaactcctagagaaagacataggtatatatctcatgaccttcgattaggcagtcagtggtctcaagatgatagcaaaagtgcaatcaacagaagaaaaatagataattggactttagtaaaattgtaacttctgtgcttcataggacaccatcaagaaaatgaaaagatagcttcagaatggaagaaaatattttcaagtcatctatctggtaaggatttgatatccagaatatctaaagaactgttattttgttgttgttataactcaacaacaaaaagacaaacaggcctgtttaaaagtgggcaagggacttgaatagacattatccaaagaagataaacagatggccaataagcacacacagagatgctcagcatcattagccattggagaaatgcaaaacaaaacccattgagcatgcacatcacaccactaggatggctgtgaccaaaaacaaaccctgtatcaataaaatagaaaatagcaagtgttggtgaggatgtggagaaatatgaatcctggtgcattgccgatgggaaggcaaaatggtacagccgctgtggaaaacagtttggcagttcctcaaaaagctaaacgcagaattactatatgatccagcaattctactcctaggtatatacccaaaagaattgaaaagagggactcaaagagaaacccatatgccaatgttcatagcagcattattcacaataaccaattgtgaaacaatccaaatgtctaccaacaaatgaatggataaacaaaatgtggaatagacataaaatggaatattattcagccataaaaaggaatgaagtttggatacatgctgtgacatgaatgaaccttaaaacattattatgcttagcgaaataaccagaaccaaagaacaagtattatttcactcataggaaatatatagaatagacaaattcatgggtacagaaagtaaattagaggttaccaggagctaggggcaggggaaaatagggagttgatgcttaatggttatggagtttctgtttgaggtgattagaagttttggaaataggccaggtgtggtggctcatgcctataatcccagcactttgggaggctgagtgggtcacctgaggtcaggagtttgagaccagcctggccaacatggcgaaaccctgcctctactaaaaatacaaaattagctgggtgtggtggtggatgcctgtaatcccagctactcgggaggctgaggcaggagaatcacttgagtacgggaggcggaggttgcagtgagccgagatcatgccattgcactccagcctgggcaacaagagtgaaagtccacctcaaaaaaaaaaaaaaaaaaaaaaaggtttggaaatagtggtgatggttgacaatgttgcataagtaattggtgccacattgtacatttaaagaagatttaaaaggaaaactttgttttatatatatattgcccccattttttaacgggctaaggatgtaaatagacagttcaccaaagtagatataaaaatggccaataagcacatgaaaggattctcaacatcattagtcatgagagaaacacaaatcaaaactacaatgagagaccacttggtgatacccacgaggatgactagaataagaaagacatgtggtagtaagtttcggcgagcatgtggagcagttggaaaggaaccctcaacacacagctggcaggagcagaaactggcttagccactttggaaaacagcggacagtttcttaaaaggtcagacatacagttaccatatgacccaggaattctactttctcttaagtatatgcccaagagaaatgaaaacctatgtccatataaaaacctgtattgaatgtccacggcagcatttctcataatagccacaaagtggaaaccagccaggtgtccattaactaacaatggacaaaatgtgacctatccatacaatagaatataatttggcaataaaaaagaataagtatggataggtgctacaacatgaatgaatcttgaaacatactaagtgaaagaaggcagtcagagaagactacctattgcatggttccatttatacattccagaataagcaaatctatagaggcagaaggtagaatagtggttgcctaggtctggagggttggggaaacgggagtgacttgctaagaagtatgaggtttcttttcggggtgatacataccttctttttttgttgtttttgagacagtcttgctttgtcatccagcctagaatgcagtggtgcaatcacagcttactgtagcctcaaactcctgggctcaagtgatcctcccactgcagcctcccaagcagctgagactacagctgtgtgccaccacgcctggcttatgttctaaaattgattgtggtaatggctgtacaactctatgaatacactaacagccactgaattgtacacttaggtaaactgtatgtcatgtgaactttatctcattaaagctgttatcaaaatcacaaacctaaaaataattttcaccaaaatgatttcccacaaataacaactaaagcgatgtttcagtcattaactagaatagtttttaactttttattgtggaaatattcaaatatatacaaatgtaaagagagtagtataaagaactcccatatactcatcaatcagctccaaaaattgtcagtgttttagggtgctttcccccctacactttattaaaaaaatttcaagcatcagaaaagttggaagattgtacagtagaaaccaatatactatacacacctcctatattctcccattaatgtttactctgcctgacttaatctgtatctgaccatccattcgtccctctctccatccatcgatttgctttgtattaatatatccatttcaaagtaaattgcagacagcagtacacttccccttaggtactcctgcatgcatatgaatgactagagttcaatatttgtttacagttctctttgtgtttttgaggtgaaatttatatacaatgaaatgcacaaatttaaagtatatgttctatgaattctgacaaatgtataggtttgcatgactcaaagccattgttctaacatctttaaaaaatatttttaattggttggagaccttcaaaacaaattcttttcataggtttattgtgttttagtgttggagttttttggtaaggttttctctttttcaattatatctctgaagggcagaaataccaattatatattataagctacccatctatacacatcctcagccttcttagtcttttgaatgaaagccaatttagcatttcactataaacctgtgttttaatgtatgtttcatgattaacatatcaaaaactttgctctgccaaaatctacattttcagagtaaacagggtgcctggcatgtaacgctttgtaagatgaatcagcacatacaattttaagccagttaacctacagtatgctcaatattgttataggttttctttttttcaaaaacaggcaaactaagttttctttttcatgtggaaaaaataacaggatagaaaactcaacactcaccttgcctgttgaaacatactaccaggttgtaataatctgagaattcatttgcctttttttttcagtgcagtcactacaacagtctctgatcattattacagtaaatttttacacatttatgagaaaaatccaatataattgactggtgaggatggtctatgtcctaagcaatgctgtttttaaatacaaattgataaaaagttatatgaaaaaggccgtccttaaatagaataaattcgttccgttttttattttaaaccaaacttgatcttgacattttcaataagattttcatagagatgctcctggggccttctgctaaaaatttggaccacttcatgcccgtgacatgacatcattttacacattagatgaaatgaaaatcagatgagatggacacattcagaagggatagaatttactgtcgtttttgaatacgtggcatggcaattgccttttgcaggatgaaaatattcattgtacttttctttcatcacaaatgttgtggatctccctggagtctagaaagtctttcctatttcttaattaccaaatcttgggtcgcacatagctttctcgttgttcctgttgcacccagggctgtctctgccatttcctctgaaaacaactatacattaacattcaaggtttgagtcgggggctgggaggcgaagggaaaggtgataattcagatgttatgaaactgtgataatgctattatttaaggcacttacttgggtatgtttatactttgtagttttataaataagcccaaggggctcctcttggttgtcacaatcccccttgaatctcgtatcctgtctgtctcatcctatccgacagtagaattgatgccgctctaatccctggaagtttggaactaatgaactgactgctgagctgccgccacggagcttggtcccaaactatactgtacttcacactcgatttattctccagatggcgagactgtgccgccctgccgcgagggaccacctcttccactggagtgtaaaagtggacggatgttgttttctttgcagatttgatcattctgagctagaaacttgcgaggatgattagttattagctttaatgggtgccaattgaaccaactgcacgcatattttctcctttaatttcagagtctgcaggttttggtgatggttgatttctccgctttcttacgtcaccagagcgtgtctcttccccaggtgataggaatccagtctctgaaatcatagcacgccttggttcctggcccagacagagtcacctaatacggtggcttatggataaggacaagtttattagccactggtccactgcactgagcagcatggcacgaaatatcgattgaatgcggcaactttgggaacaccattttttagaatgggggcctgcaaagattgtaatctgtgccaacttcctctatgacctgggcagagtccacctctggatcaaacatgatccagaacacgctatggtaattagtctcttcgaagttctaatgtaactgttgataaaggccttaattccattattcagtcatttccagcttgtcagatcttgggggacaagttcattccacagtgagaatggctcaccaaggctgtcctgtagtgttaacacatttagaatgcagtccctctcaaacctcattttaaacaacctgtattactcctaggatataaaagcccccataaaagctctttttggggtgaccgcttttaccttaatttcctttttctccttcctccaggaagcacttacctcccaatagtcgtagcaggtcaccctgagagcccttctgagagctggggtcagccaggcagcctcttgctaatccacctaagatggatattggagggatggtcagagccaaccaggagccaaagaaagagagaaagaaaaagaaggaaagtgtgaagcgtgaaggatgaggtggtggagatgagagagctgagagcgctgttagcaagaagtacagtgtgtgtggcagagagagggaaaaagagaataaaatgaacagaatttctttcttttcacaactgggtggactgtgactctctcgaactgaacacccagaactaaacttaattgttcttagaaactgccttcctcccaacccaacagatggcatgggcgtgtttgctagcacagtcaaatacttcaccctgaaaataccaaaaagaaaaaaaaaaattcaacatgctcgctggttggggtaaattcactgaagttgttgagtgttttgggatatataccagagggatgcacacttggtttatgtaaattgtaacaagcaacagccggttaataagggtgtcgtatggcaacttacctcaaaagccatcctctgtttttggaaatgtacagaatgatgaagtgtaaagagcttggtttccattctgagccaaaattttttaaatgctgagtattcactgctcattattataatatgaaaagtactaatcagattatgcctaaaattggaagtaggtacttcatttgcagccaatttcacaagggccgaattttgctaagtaaactggaatgtgctgaaaccatggcaatccgactttagataaaaatcaaacaggtttagaacatgagctttgaacaaacaagtcccttcaaatccaagtgaaaccaaacagcttcaagatcagattttgtttgacaccagccaacattaacaatttaggaagttgatgttgccagggatcctgcgttcttgagcacacatgcagattagaggatggagatgatgactcaaataatttaagctttaaaatgcagtatggcctaaaaaactgagtgagttcccttcaattttccattcatactgtcccagtagactctttgcaaggctgacttagctattaaaagggaacctggaagtcacattgacaaactccagcaatcttatctcgtttttttgtagctgcataggctacacagagaagaacatgctttaggttctccacagccatggatctaaatgtgccttccaaaaagctgaaagtatttcagttttttggtttgtttgttttcgcttttgagatggagtctcgctctgtgtcctatgctggagtgcagaggtacagtctcggctcactgcaacctctacctcctgggttcaaacgattctcctgcctcagcctcccgagtagctggaactacaggtatgtgccactacacccggctaatttttgcatttttagtagagatggggtttcaccatgttggccaggctggtcttgaactcttgacctcaggtgatccaccccctcagcctctcaaagggctgggattacaggtgtgaggcaccatgcccagccagagctcaagtatttctcccagcagctctagacagctttagagccaagatactgagccaacttctgctcttcacctttaagattttcgtatttagggccgggcaccgtggctcacacctgtaatcccagcactttgggaggctgaggcgggtggatcacctgagatcaggagttcaaggtcagcctggccaacacagtgaaaccctgtctctactaaaaatacaaaaattagctgggtgtggtggcgggtgcctgtagtcctagctactcagggggctgaggcaggagaatcacttgaactcaggaggcagagattgcagtgagccgagattgcgccactgcactccagcctgggtgacagagtgagactgtgtctcaaaaaaaagagaagattttcgtatttaatggctgtaataaagaatgcatggtagagcaagtgggcgagttttatatctatggaataaaacaaaggtatgatgtggaaccaagccattgctggctgcatcatctctgactttagctagtctgagctctctcttgcttttgtctaagttggcctaattattggcagatgaagctctgtaaatcaggacttcacagagcagtcctaaactgtcttaggtactcttcccatctgacccgacaactctaagctaccgtttcctcacattgtttaactcagaccacatttggaagcattccttgcttctccccgctcatagacccacatctgtctggtttaaatctgctgtcctgggttgtcttgttgctgggacttagactcaatatttggcttaaataattcttttttgtctctgctttggtttgctattttcctagatcagtattgcttttcaaatggttatatattattgagaccttttttgtaaactacattcatcagcagtgagaagctttaaagttttattagtatcataaaaacccttcccaaatgaaactacttttgataagtgttcattctgacaatgagaatttgttgagggctgttggcaagttggaggagttggcttttgaaactgaaattggcaggaagtaatgacccccagtgctttctttctcttgactccagcctcaccctttccatgcacttctttctctccccaaccccaccttcattgcccccaagccaaagccaagaaataacatacttggtttcatatagtttttctggggacaattcaaatactgaagcagactttcagcctttcagcttttctgaactgtggagcaaagcctgtcaagtcaaagaaaaaaaaagtatttgtcaagcacttcatgaagggattccttgccttccacctgaagaagtgggagcttttcttgtagtacacattgtcagattcctgtgagcatcttcttaattgaatgtcaagattcaactcagttgcaaaaaaatagtgagtaaaaaaagcatgatgcctgtggaaaaagaaaaatccttattttttccctaatgtgaagaagctgacagacgagatggccacaatctagatgttagccaatttcttatgtttattaaatgagaaagtgcagggaaagaacatagaaccatgcttagcacttaatgctcaatcagtgaaaacttacccattaactattttccccttcccattgggaagtaatgctaatgagaaagacgacacttccatacagaagcacacccatgtgcactgcggtgcgtctcggctatgttatagctatcgcgaatgaaacctaaaaatcaactgctcacctttcagactggatgactcctttcaaatattatttatttggtggacaggaaatgtgtagatagaataatggtgctcagactctgaatccacataacagtttcatcaaccatttgatggtgctcccctcaatgataaaaataaacaataaactttttattgacacttacagaatgaagctcgactgagaattgtaaaaactcttgaagacattgatctgggccctactgaaaaatgtgtgagagtcaactcagtttccagtggtctggcggaagaagacctagagacccttttgcaatcccgggtccttccttccagcctgatgctaccaaaggtggaaagtcctgaagaaatccagtgggtgagtagctaatgctttgccttaagactcaggagcagctaaggaggagtagcaggaagaagggatctgggtgccacaggtttggaaaatgcatgcagagagcagagaggaagggaattgagaaaaagcagtaagctcaagtatccgtttcttttacacaaggaaaactcgcctttgcccaaagtgttctatgaaacaactgcacttttgaaatgatgcttcgcttcctaattggatgtgtggtttggccagaacagcctcctcagtagccctcccagagtaatccctggaaactaggttgcccgagaatctcatcccttcctccaccctgcccggccctaagccaaggcctccacctggaagagcagtgacgtaaatggcccttactgagattcatctgaaatcatcccaggcagggagggcacatttgccgcatatgaaaaaatgaacccaaagaaggggaggaaaaggtcactctttagggcaactggaggaatgaacaggaagcttttaactagtggtttcaattagcactgatattatttcctgaacagttctctagtgcatcctttttaaattgctgacaggtgtgtttgtgtttcatgacagacttttcagccaataaaaacctgaaatgtaaagtggttggcatgtcaaattacttaagaaaacttttgaaataggcctaattacactatgattgttttaattgacaaagggtggaggggctagattttatttgagggtcgctattattctgcagatctctactgaataaaataacatttcactgtgttgttctgggacagaaaatgtgtcattctgggccctgtgaggtgtgaaaactggaagcgtttgtggtcggggcgagtgggcagtggtggtttcatggaagccacatctagtattatctctgaggctgtggctgccaccacagcaataccctgagttgttgtaacacctacgaaactgctcacctgctgaatgcacccgatgtgtgaggtctgcgttgcccagtgccacggccactatgacatgtggcttctgagcattgaaacgtggccagcacaaatggagatgtgctggaagtgcaaaatacacactcgattttgaagactcgggactcactgaggggacaaaaagagaatgtaaactatctcgataatttttatattgattacacattgaaataatatttgggatctattgggctaaatacaagatactattaaaattaaattcacctgtttcagtttaccctcaatgtagctacgagataatttaaaattattatatgtagctgctgctatacagtttcttttggacagctctgtgttggatccttcttgaagacccgtattcaaggaccagttatttattgactaagctggagttcttctctccagggttaccctcagaagctgggagatactagttaagagtatgttaatatcctggagggtcctgagcccattcagatatgtcttaagttgattgaaatggactctgaagtcactgttcccttttggtttcatagttaatgcctatttatcaccgttattacctttaacttaagatgggggagggggagacccagccagccttccgctatggcttctgttcactgttttaaatccttggaagtgagacacatacagaaatttaaatagaacttctagttaacagaagtccttttggctgtttattttttcctctccgtttgtatttatgcgaagcataaaacccagagcctgatgcacaactgaaagatgggcttacttgttttcttttgtgtgagaatctcttgctcgccttttgtcgctagtgtgggttcttgtttgactggcacggcttattggactataacaagcgtaaccctgcctcctttgtcatgggacaattctcccacaaatcccgaacagtgtgcattcttccaacacactattgggtgtgcactggaattgaaagaatcgctgagccctgctacttcatctcctccccaatctctttgtgatttctcccccttcttctcctccccctaccccagtcccctccacctcgctgaaatgaacactttaccaggccggaaacatttaatcgtctccttttgaaaaaattaattgaaacttctccactagttaccttttgtgttagtacttagtgcaattttttaagaaagagggggaggaggaggaggaggaggatgggctagaatatttaatttttaaatgcccctattggcttaaaaacaaaaggcattggggtgttctcactaagaacagggaatatattgtaaagtgttgacttggttttaaagtccatgatttttgtagttataactgtcatcacaaagaatggggcaagtcacttcacaagttttcttttttaatgagaaaaaatatccctactacatttttaacaccaaaaccactaatactgtgctaccactttctagcataaatgagaaataaattatattttattttcatctacatcaaatactatacattttatccccttaaattgtcaccccctgctccttcttgctattttggttgagttattccttcccttgaaaagttactaaggaggtgatgatgatgccctttgaagggggggcagtgggagcaactgggaataattcttcattactgaaagctgtgatttattttagcctaattgtaaagttactgcaaattgctcaaaagctttttaaagatcccagtgattagattttttaggggggtggtgcaccggcaaggagggggcagctagaaggggaaataacacctctaatcccgcttctggtaaataggctgccagcttttcaaatgagtttcctttctattagtcagaatattatgctaagccttaagcattagtttttttatgttgccatagcagccttattcctgcagggtggtgacctgtgatgattacagtacaaagcttatagggtcttgaaaccccctttgaagatgaaaagtctttgatggtttatatttatgcaaatctcttagatatgatttacccaactgagactgaatggagagatgattaaaattcccttttcctttgatatctattaatggctgaatattccttaaatttaaaatggatatatatgttttcatctttatttacaaaaatacctttatcatacctgtgtttcttctctatctatctccccacatcttattagatctagatagacataatagatttacaatttagagtgtgtttttttcccccttttgaagagggggaggaatctgggcaagagcttttgtatgtttccagatgatagattttggaatttgggctaccccactggcagcacagagctagctgtgaactggtctcatggaaaaaattggcgagctttggtcttcaaagaattaaacttcctttttaaggtcttcctaggtaagctaaaaaattatgaagaaaaaccttctgaacaaagggtaatggtgctataatgaataatatggactccacgtagaaggctgctgaacagttgcactgatgtcagtgctgggcacgaaacaaaaacagaatggcaggtagaggaagagttcattgttttaagggcctaccatttgcatttaacgaagcgagggcaagaggtcttaagtaaatgcgttttcagggaaagcgtttatactctctccttccagttctaactcctaggcctcaagttgctcctttgggagaaaaaaattgtaatgcttaggattttactatttagtttggtgggaacttcattacctttttctttggactttcttcttatttttttaaaaaaattcttttgtgtggacgaaagaggcttggatattacttcctcaggtcaaagacttaaatactacttctgggtctacatttccgtgattgtacattttttccccactaatcacctatgacacttctgattttagtttgcagacaaattttcattccacttaaaaggccgaaaacttgaacaaccaatgaatttaatcccttttgtggaaactgcaatgggtttgctcaattttaaggtaaggaagccataatacggttaataagttagcattttatttatcacctaaagagaacttttgctttcaattttaacatcttcttaaaatgtgtttctagaaagatttataagcaaaggaaatgttgagcaccatttgttatctgtaatagtccaaaaaccaggttgccagcatcttagaaaacaatgaaatcagttaggtagaaggaaaagcttcccagtccaaaatatttaaatgaagcatttgtatattcctagtaacaattttaactaatcactgtgtaattatatgctttgaattattgcatttatagactaaatgtacatgaaaatttgtcacccttatgaattaactttgaaatgttcttttctatcaaatgtcttttcagtgggaaatgttctgccctctctgtagcaacattatcagtaatgtctagcagagaagattattgtttgtaagttcatgcacacaaataatttgcagtacagtttttcagtttgccacattagaatatcttctaatatacatgcgggaatattggctgagccaagtgttttcagccgttgtgtggttgcactaaactaccggtcttaacaaattcagagctagctcgttttttctcgtttatcagggggcatttatattattttccaaaatatgcctctcattccacctgacctgcgaacatcaatctagcaccccctttcagagttcctagattcccttcccccaccccagcccccacagagggcaggagaaaagaaatcactaaaaacaacagaaaaaacatagtcgaactgtactggagagagaatgtgtgagcggcaactttgaggccttgggatgtgcagaaggggtcgagtgcaaatgtttggggacctgcttcaaaccttgtcctgtgagcagcttgtttacacaactaaccatacattcttccagccagccccagaatcctgagaatataatcaaaagcatatccctaagatgcaaccagattcatccagtgatttaattttaagcactgcttcgccattttattccataatgtacttagaagcacttacaatgtctgaaattaatcaacagtgtccccaccggttcctcgtttctttcccacccacgtatattattagcaggttatatctccacctttcaagattcacggttatgtctacgacgaatggtatttgccttgactttcatatataaatgtcgaagttgctttatgaacacatcttggatgacttgttgcatttttattttcccctccggagttgcaggtttttgtgctgtctttaatcctgagaccatgtgcttgatcctaatgcaaataattcaattagtttgattttaaaattccttccttctcccctgtggttttacgagagtctcttaaagcaaaaacgaattctggaaagatataaataacttatagtgcaagcaaaatgagttaactcaaagtttctccaaaaatgagatgaactacaatttgaacattataactatattcatataatccattaaacaaagcaaatatatacaatatacttatcttggatgatattaaataccttttgaaaggggtaaatttgggctgcgtttttaggactgctttcagccaaactgtgttaagagtcaggtcgtcctgttactgaaatgcaccgtgcctcttccctctgacgcacgcgtttccgtgagacttagttctgttctgctcttttacaggcagtgtgtgaagaaaccctgaaggtcgggcctcaagtaggtctctttctagatgcagtcgtttttggaggagaagactttcgagccagcataggtgtcaaagacatctctctctctctttttctgtgtgtgtgtgtgtatatgtgtgtatatattttttctttgcccctcaaggatggacatttacataacaatgtatatttgccaaccatgacaatggtttttcatgacaatggaatggacactacttcctgataatttagggctcctcatagctgccctgcttctagagcactgcattattacttctgttcatttataaaagacacgagcaatagaaagcctgttgcagccccaggcatgctcaggaatatatggcatctcctttgctcctaataaatatattatgtgaacagcctcaccgttgcttcagtattttgttttcatatcagtctgtgggctgtctagatttctaacgcaaatttaaggcaatttcacatttgccttaatgaattgttttctacagaatatgcggtaggtaaatattattttaaatggatcttaaatttctcttacaatatgtttcgaactcttagtattaaatgtgctgattttcaccgattctcaccatcccttgtgagctgcacttgaggggtctgcatgtttgactggagaccgtgaagcatttagaaaagaggccgaggccacagaaaccagccccagtgacctgaagacaggcactttccctaggcagggagtggcatgttccaaatgtaaacagggacacttccctcccctcagggtgaaaaaactgaatttatttgaatacgagtctttccaggagacttgtgtatccaacggttcagcgggctacagaaggcatatcgatgctttccagccctctcaaaacaagtgccctcccgtctccccaagttctccatccagacagaccctgaagctgaagcatttggctcagaacttcagtttggacagggcaatcgcagcacacacagttctgtgcttgctgtgaaacacgaaccattgccctgcatagctgctgggccaccctttgtggtgctgtctttggactggcacttttcaagcgatgataagaaggaaaaaaatatatcaggagtcccttgcgaccctgacccagcctcccagaatggggaaggggccttctcttaatgcaggtagaagtaattctattgaaagatgccttgtcagttaaacagacacattcgaggtttaacttggcctccacgcgtccctgtcttcatttgtatttcaataattttattttgcggaggagcaatttccagggaggtttagatatctgtacaaactgaggttttataataaatatctgggtgcggtttccaaagttaaagcctcctttttctgttaacatcccattttcaggtgcaacaagtagtaaagaaaccctggatattctctacgcccggcaaaagattgttgtcatagcgaaagcctttggtctccaagccatagatctggtgtacattgactttcgagatggagctgggctgcttagacagtcacgagaaggagccgccatgggcttcactggtatgattcctgtcttagaaagcagtgtctaaattagcaagcattccagaaaaatagaaatttgacccgaaaacacccctaatctcatcagatatctcccatacttactccactatttgaaatatgagcaagtcacacaggggaagaacttgccagacacattgtcatggttttccttggccctgcaagtcaacaaatcactcattttatttcctctttatattagttgcttttttttttttctctccatcctcttaatcattttgttgtagtcttggctgacctgtagggagggatgaggctgctcaaaaagtgtttttgagtgaaccgccataagaattttggttgatggacagaagaaaaatctcctagaatatccaaaatttaattcatttctgaaaaaaaatgttggtgatattgtctttggtttttgttttgttttttactcataactagttttttgctcttctgccactccaagcccctcctctctctcccacctcccagtaagtgtccgtgtacctggcgacacctacgggcataggctggcactaggatcagcgggtcccttgcagtccggtctggggcacaggcgggtatctgttgattggtgtgcctggtcactcaggtccccatgagccaggggagcaacagaaaattgtgtttttacaacagagatctatttttcgaaaaaccacaataggagtctacacacaaacatacacatggagttgcacacacacaaactgacaaccatgggaaaaacacagtgcactccttcactcttacctgttcttctgttgttgaaagttctaagaatattaatatcagaaaggcacccgaataattaggaaaagagacgagcatcctgatattcctgttataactgtttttgaaatatatctaggtagcggttaccgaaagaaaggtttcataaagcaggcttaaacgtgaaaaatatcttaatggatgatgatttagtccaaaataaaactgaatgacctaagaagctattctagtgttatattcaaattaaataaagctctgagtttgttcttgtgttttttacacaaagagctaaaataaatatgaccccccccaattttttaaataagtgtgatctcgtatagggaaatactcttcaattatctgaactattaataaacgaattctccctgcgtttcatagcgactgaggaagaaaggagtcctctgccacatccatgcaattgtgcttgttcctgcctctttccaacggctggttaggatgtgacccaaatggaaaagttggagaaaaactccatgaaatttatctaatagaccctgatgttgttggcctgcaatgtatggcactggctgccaggtggccagatgttgctctgaaatgggaactaattcgataaaaaagagaaagcactgcatcgacactggcccctccaccatcacccagcagaatctgagtttcctctgcctcctctggggtaaatgtttgccccagaacttctctgggagctggagagtgtctccaagatacaggactgaattaacttggcccctaattcaatcgcagaagacaggctatttcaaatcaggtttaaatttctagactgtgcccagctcagcacgagaagcttatggacctggcactattgtttctccacgacggggagtattaaatcgctaaaaaaaaaggggggaagcgaggataatgggaaggcacagagggcacagtgcccattatatattcaagggaacgaggccataactagggagccacacttcgtaggcagtttgcaatttttagaaagtctttgttgccccaattatatttctgcataccaataagaggtaatcaatctgataataagatagattatttgtagtcattttttaaataaatgttttttaatgagtactttagaccactcaggatgtttgtcctagttgtttggcatttgattgccataccttgggccttgcacaaggagaagaaaaagaaggaaagaaaaaaaaggaaaggaaaagtggggaggagagagggagggatggaggaaggaagacatgtcttatctgaagcaggtggttgaaaggtttaaaatccaatgaaagtattgtgttatccataacgctggtaaggaagactaagtctgtgctataaggattgcctttacttttaaaaatgatacatatttttaatgagttgtagtttttaaaagttagctgtagtttcttttctgcggtcgtttcccagagtcacagtccatgtcgattgattttaaatcaatgcattggctgtataaatggccattaactttaggaaattttttataaaaaagaaaccaaaactaaatcttggaataaagctttaacagctgacttagtcattacagttactccagtgctacatgctgagaagaaagattataaatatgaagcactataggttttcttcttttttgcagtctattgtagaagacaaaaatgacaccatcatacagttacctaaaagacttgacaggtattgatttaaagcacgatatatcaagcggtactgtaaaaaggatttcatggtcataaattttaatgtcttccaattttgcaccctctcagtaacttgtcaataacaactcttttgtataaaatatttgcctggttcccacatgccattaaagtctgctatacagttgttggaatatataagatgtgacaaaagagaacttcacatatgaacgttcacacatttctaaaacctaacatgtatcttaaaattagcctcattgcccaaatataggtactggaggatggagagctagcagtgatttcacagtattttaagtagtttatgttttgctcctcaaattatagtgcatgtaccaagaagttcccatgaaatctggctttttacgcattggtgtaaattatgtacataaattatgaaattcagggctaacaattaggaggaaatgactaccagaactgacatcctttattaacaatatcccgacaactattaaattacttaaatataatctcgatacctactaccgaaaaaagccctcttgtcatccctcatgttattcgttcccagaaattattcctcaggtaatttaaggaatctttacttatataagtgtttaacattttattagtatgctgacagaaaagaatgaaatagcaatgtgaggatgttttaattatgccattggaaagaaaagatattattatatttatccacttaaactcttttacatgaaacactaaaaatatgtttttacaagcatcattccttttttcattctaatagaataatgacaataggaattgacagcaaggatataaaacatcaaggatataatttctactgtctaaatgttaaaataactatttcaaaagcaaagcaaactgatataccaacaaatatattcagcagagtaaatgatcattaagtgtacattcatttttaaagagccaattatgttcataactttatcacgtaacaatataatctcatcattattataacattaaattatgttgcattttattaatgatctgattggattctacacttccctgattgttaaattgtttttttaatgactgcattatttcacaaaatcctgtggctcttatctttgtgtgatgttttcatttaaaatctttcaactataaaaagaatcataaatctttttggaaggtatttctacagagataagatttcttctgggatatgtagggtgctataaagagggaaatacccagtcttgattctataagccaaaagggaaaatctgggtatatttttggacagagaaactttaagtatttattttttaatttttaaatggagtaatctaaggctgcagtgttcaaatctgccttctattttaccatactgaataaaatattttcattcaaatccaattttctattgggggttagaattgacacataaactgttcatttaaaagaaaaacaattaaatatactattgtaaagctgtatttgatagtaatatagttgtaatgactgcctctgtaagctttatgaaaaccagcagaccatttctaagagaaatcatggaaagaggtataattctacaaagaaagcaaaagacaccttataaaatttgagagaattctcatttaatttttttctacttcaactcaaaataatccctctaatttgcagacattatcctttaaagtcccagccaaagcagttattcaacaagctgcctagtcagcccacctgtaactaaaaataagagattatctgccctaaggtggcatttctataggatcggaaacacaattacttccattgttgtagttgtgcttctgtggtattctggaaaagcctgtctgattgcaggttttgtttgttttgttttgtttactcaataaaaagttttaaattagttatttaacatacagtctatgaggccttcaggaacctcacgcgatagaaacattttgtttgaacatctgttcgttgtttcgtggttccgatgttattaatattcttgtaggtaagcaggtgattcaccctaaccaaattgccgtggtccaggagcagttttctccttcccctgaaaaaattaagtgggctgaagaactgattgctgcctttaaagaacatcaacaattaggaaaggtaaatgttttgttaatgccttgggtgagagcagtattgaaaatattgtcgggaagaatgaaacaaatatgttgtgtgaatggtttaagaaaactcatcgtatctggagaggggggaaagggagggaacacaacattcaccagtgagaaaattgcttgagatagatttgccctgcccatgttcctaaatacttcactaactggctctcaagtccctcattttattcttttcataaaatatattggcagccttagagaaaatagaagtctgtttagtttttctctacagacttctatgcagcattcatatgaaaataatcctagatcaaagtgagaacaagttgtaatgaaataaacacagtttgactaaatggttcttgtggaggaaagaaataaattgcaagttattttaatttggggggaaaaaagtacagaaatctcctccggtttagtcatttaagagtgggaggttgtatatgtgtttgtaccaatttctggacctgagatttggatggaatggaaagcaaattaacactggagtacggttgttcctaatttagtgcatcattgagcctcgcgtttcctgctctgtgggtttctgctatgtaaatattgcagtggtaatgcacaatctgtctccactttgtgccagtaacacttaaattaggtgtcgcctgaaggaagattttatgctagttgcagcattgtcagttaattatcttaaaggttatttgcaataataccgtttgcctctttttaagaggataggagggaaagttacatttataaatctatcctagaggtaatctctaaactcagcctgtgacttccagaaggagtaaagttttgatacctataatgcaaaattacttaggagaaagaatattgaaaatttattacagttctgaatattaaacattcccccctgcaaaaaaaaaaaaaaaagaaaaagaaaaactggtttttagtggtgaccctgaacctgtgacatccatgtgagacatgtccctcgcacttttcactggcagcaaggacacctgaaaatcccaggacttgccaaagtgggcaacaatattaaatgggtcattccctaaggatgtccacattcaacccatgcacacatgggcacactcacacaccagcaggctcatctttgtacaaactcacacttaatctccaaaggcagaatatattacgttggaaatacccaatttggacttacaccaatttcatgataaatagcatctttccatttcccatcaacagtggccatcagaaaagtaatgcatttcatagaaacaatattttaagttgaccttgtgtttagtgtccatttttgtgtcttaaccccagatcaagattcccatgagtaaatctattcacctagaacgaagagccacggactctcattcacatgtccatccatccccttcccttgcatacctgcccacgcatacccacaccgaatgctctatacctctgctacaagccttgtgccagctgaggacaggcatgtcataaacacctcctggtgaaataggaaactgaggcagcatgtggaccattgaaacgagagagcagagttccagtctgggccagcactgtgtctatgacccatcccagctgggtttcacattgggtagcatcaaaggagggcagttggcattgtaagcagataggggtgtgggagagtttaccctgaatttcagtagccaacaaacagaagtcaaaccagaaacacttgctttgctcagcatttaagtttttgaatgaggaaaatggcccttttccattgtatcttgaaaagcgttgttccctgggaaaacgctcccaaagttttcacaccttttgatgatggcaacttaaatgttcaattctggactttttttttttttaaataagaaatgccctctcgttggggcataagctctcacaacagtgtggcaggatggcttttcttaacacagaaccatagaaattagagcagaggggagactaactattaggtaatttcttccctgccccatttgtggaggtttgtttcctatagcaaattctcctggtgttttgtccagcaaggttgaaatgattcaagtaatggggcttccagtagggacatatggttattttatccagttagcatgtttctttcactttgcctataaactggccggtcacagaaattggatctgcaggtaggtgactctggatcttgaggggatcttggggtttaaataatgtgggttctgtttgtaaagattttgtgtaaataggttgcacaattatataaagtattgcttccaacaaacatctagtctgttttatgtcaaatgtgaatcactgatgaacacgtgaaccctcagatattttgtccaaagcacagatgactctctcaaagataggaaactgatggtttgtgtcctagtgtgacagtcacaaatttccaaaagacctttttcctccctctgatgaaaatttcattcaagtaatgcttttaagtagaaatgacccaagaaggaaaaattatgtatctttgcttttctgcacttcttcctgctctcatcttaaattatatcctgcccaaacataaaggtatagctgaagttcacagttagccaaacataaaggtatagctgaagttcacagttagtgctgagccatttgtgttttctatagtaataatcattactattattcaaacataaaagctctaccctttcttcctgtcctgtccaaatggcaaaattcatgggactacttagaccatgagcagataaattattggagttcagactttggtattacagaattttggggatgtttattttaattaaaagtcctaaggaaataaagtttggtgtccttggtataatgttggttgacaatcactttacattaaaacaaataacaatcagctcatatcatctgtccctgtttggcaggcagcgattcttgtggctgctttgtttcaggaaactgaaagatattttcaggctaaaaaattttgcttggcaccgtagtccagtaatcagagttagggctagagactgacactggggactctaggttatcttatcttattaaaatctgttggaaaaagtttaaagattccaaataatctctgctcctatgttaattcccagaaactaaaatgtttttaatttagctgacatcagctgtaaggtttccatccacaatattaatcaaactgactttcttccatccttccagaaaaatgttttttgagatacaacgtgcataccattaattattttagtttcaaattatttggtaaaatgctttaggcaggataaatcatttccacatgatttgttttaaatttataaaggattttcttaaaagttaattccatttttatgtctttttttataataatggtgattccattaatatttgaaaattcttcattcagaactgaatttaatatgcttattaaagtaataggatttcaacagttcttttttatcaataaagaattttatatactgtaaaaattggatacttgaaaacatctcaagcaaataatcatctaatattgatatcaatagaaataattttatataaacacatatagcatacatgtttatacaacatataaacattcaagtatgtatgataacgtgtatttcctcaaatctatattatgagcttagtgctaaagtttttatctttccatattcatcactcttaggcaaaaatgacagctaaaggaaacagtcagttgcttttttaaaacagtcactaatcacaggaaatgttaatataggaatttactatttctttccaaatggagactctaacagaagaatgcgaaggaatagcacaatatattacgtgtgtcaaaattttaaagatactctgctagaatattcatattttgcagtatctggctacaaatatggctttgcttcattttcagttttccagacattctctttgattcatatcatggctgtacgtgctttgtttggttttggaaggattttgtttggctttttcaatatttctccttcgttatagcttcacaagttggctaaagactgaggaaggggaagtattcatctttaaattctaggttcaattaacaattacaaatgtcagaaacaagatcactacctggcctaacaactgtaagcatcacgcaaccaacattctcatttcactcaggagagaaaaacagtgcaagctgataagttcacattagtaagcacatcttctgctggaatataaactggaaacatctcttaataaagaaagaaaaaggaaagtaagagtttttttccttatgtaagtctcttcatctagaaactttacaaacagtaatacatccctcctcccaaaatattgaaagcccatcattttcataggtgtctgattgctgctcgcacacctttcatttctgtttccaaatgcaaggctttacaaaagaaatattgcttggtccagatggccttctagaagcctccctgagagaactcaggagaagtttctctagccaaaaatattgtttccgcttattcaagtgccagaaatcccactgccactctttcacgcagatcaaataaaccatctaaagacgtggttgttgtctttgtcaactgaaagggttgattccactattagacaacagtgtatcctcccacacccatccagcccacgacccacagccttccctctggatttatgagcaggaacacgaaaatcagagctgagaggtttgtagtgaaaatgaaagataaagggacataactctgttttagagattcttagtaattgcacttttctctttatttccctgctcatttaacattttcagaaagatcggccataattttgatttttaaaagtccagttcttagaaaatctgagtctgccaatgatgactttaagattggatggattaacacaaaattgcgaaattttaaacatttaaagcaaagtaatgaattgctacaaagtattgaaatcatatcatattctatttcacttttttttttttttttttttttagtggcaaatggctggtttggtattagaagataagagtgtttttaataggccgggtgcagtggttcacacctgtaatcccagcactttgagaggccgaggtgggcagatcacaaggtcaggagtttgagaccagccttgccaacatagtaaaaccccgtctctaccaaaaatacaaaaaatcagctgggtgtggtagcgggtgactgtaatcccagctacttgagaggctgaggcaggagaatcacttgaacctgggaggcaaaggttgcagtgagccaagatcacaccactgcaatccagcctgggtgacagaacaagactccgtctcaaaaaaaaaaaaaaaaaaaaagagtgtttttaatgtagattaaatcggacaatgttttaaattgtttgctttgtccttaatttataacacactcttaaggatattttaatcaaaatattctttatccaggttcatatttttccgggttttatttgctcaattttgattttaaatatgtcattattttagctggatgaaatctcagaaatcttttagtcagatgccttcagtttatgacttaatgcacagaaacccagcaaggcttcagaagctgcccagtatcactcacagccaaggtggagagagggctgcgagcagaattcagggcttagtttgtaagtaaagatatggaatatcataaatgtgtcttcagttgaatattacagtgaatacccacactcatgaccaaaacgagatagagccttaaatgcactcagtcacaatcaaaatctggatttgggtagttccaatgtatgtcttttcttgaggataagcagaaaccaatgaggaaagagagaaaccagggtctccacgtgccgttccccacacgcctccctgctcagtgctgccctgccctcatcccccagccctgccccaggaagccttctaggctctgttcactgcaaaccccacttcacatcattagttatcagtcgttcagtctcccaacatagattggaaactcccagagcaagcctggggagcctttggcagagaggccatatttactccaaagcccagtgtcatctcaaggacatcaaaggacaggtccccagagtcacactctcagttacacctgtgaccacacacaccccatggtgttcagtgcctatggcagcaagatcgaagtgatggccaggagaggatcattttgttccttggacacctttccctctctttcctcttcctgtatttctccctctaaggatggatgggtctgtgtgtgtatctttctgttccaccctcattttccttgccctgaattctccatttcctctttttctttacatctttttctttctcactacatcatctccacaccccaggccatccctcaccttctttcctgtagctaattacattagagactttcagagcattcttttatttatttattttttggttgtattaattaaagaattttgtaattctttttttttttttttttttttttaagacagtgtcttgctctgccagccaggctggagtgcaatggcgtgatctcggctccctgcaacctccgcctcccgggttcaagtgattctcctgcctcagcctcctgagtagctaggattacaggcgcacaacatgcctggctaatttttgtatttttagtagagacggtgtttcaccattttggtcaggctggtctcaaactcctgacctcatgatctgcccacctccgcctcccaaagtgctgggattacaggcgtaagccaccgcgcccagcccagaattttgtagttctttttatactgaattttattaaaaatacaaagcaaccatttctataattgtcttttttttcccccactttaggtcagtgggcctcaaaaaaaaagtgaggcaatttcttaccactaccttagggaataaagaattctctctaccgtagcacgcacctccctgcagcatcttgggcagaaataggtacacgaaacacatttagtaaacattatttagctaactggtttccaaattcctgacaatgctaaaaaaaaatttattagatgtacttttaacagtatatatgacatacttctgctgccttctagaaaaattgaaagaagatgtttccatcaattatttcatcagttgttattcatcaattgtgctttgaaaaaatgtaccagtattttagtaaatctttcagtctcttctagttaatgttaactcattaaatctgttttccaaagaaagaataagcctgcattattggtcttagctacaaactgctataaatggcattcattgtttgcttttctcataggcaataggagcttaaatttgatgtcaaacatttttaaataaagacatttaaacatttggcatgttacacatttgtcttggttttaaaaataatttttaaaaatctttaaagaagatttctggtttcaaaaagaaatctgagatggaggtgatagtagcggaactctacataattactaaaaaatcaatgacttatgcacgtacaatgggtggattttatggtatgcaaatcgtacctcaataaagccactttaaaaattgagaaaattaagcacaaaacctaatttgatggcaaatgtgttaactcccttagattttgatacacttgtaaatccaattgtcttcacctcaatacatagctttctacatagcatacttggctttatttttccagatttccttgtgaaaagatatcgaaaacaaagacttgcctactcttgcctgattattctgcctgaatatttttaaagagaaatcttgccatctacatgtttagaccccgaggaaagttttaaaaatagaaggctaccttggtctctcggatcagcgtttaaagtaagcatggctctggtccgtggagacccagacctgggcaagtagatgattcgggatggtcacatatgcagataactggcacacacatgcacctcagctctcctccctgttgttcagccgcctcgacctttcctgccctgctcctgccaaatccatcttccaagccttctactgcttctccttccccattgcacccccgacttcctggaactcttggtaaagtcctgaattagtcttgccaagaacaacacacaaatctttctattttctagccccatctttccatttatttagctaaagctaaataatttcatcctgcctttgtaaaaagcagaatgttaacgctgtctattcattttacatccactcaatttccacattccaagaaatgtcctcccttttgaacaaatgtgtctagctatcatctttgctacacctcttccttttctggtccatcatctgctgaaagaacggtgtcctgcgtttcagtacctcctcctccgtgtaagccaagctctggacttcagatcatctgcatttgattagcgtctgtcctctgctgatattctaagttttttaatttttctaaatttatttgttttcctcctgaggcgctgccaaatatatagcatccctgagtctagtttcttaaggagacaactaaatctatgatttataagagtttagaggggacaggaagcttcaggcatgagcctgtttctattcattgtattttcaaaaacactgatgtttctcaaactcttgcaggtcttaaaactactctgaaatcataaaacccacttagaattcaaacagtctgcttctcactgggccattctgtgataagtggaattaaataatctctggccagcaataacagtagcaataccagtagcaatggtggtagcagtaaccatgtgtgccgtggtcatggggctggtaataataaccagaggagagatcatcatactcctaacagtagtggtggccatcatgacagtggtgtggccacagtagtgacagtgctggtagcataactgcttccatttatatatatataaaacatattccatatatgtgtgtatgtatatatatatatatatatttttttttttttttttgagacagagtcttgttctgttgcccaggctcgagtacaatggcgggatcttggctcactgcaacctctgcctcctaggttcaagcgattctcatgcttcagcctcccgagtagctgggattacaggcgcatgccactatgcccggctcattgtatttttggtagagacggggtttcaccatgttggccaggctggtctcgaactcctgacctcaagtgatctgcccgcttcggcctcccaaagtgttgggattacaggcatgagccactgcacctggcccttgcatatattactttatgtaatcctcacagcagccctacaggggcgatattatccccattttccagatgaagaaattaagactgggaaaggtagctttattcattgtggatcacacagctaggaaaaggcattcctggattcaaagtcaggtgtaatggagcccaaagtccacatccctaacctctgcatgaagctgcttctaagggaaacccccagaaaagccagatcctttctctccagggagcttcattccccttcattgcagccacaggctactgagagccacagcaggctgtgcccatcctggaaagtgtcctgtttctgtgtggagaagatgatcccccatgcctgctcagaccatcactgacctggcaggtggagctgccccaggaacacaagaggcctcccttccgtgcccctcatggccctggcctctgagtgacagccagagagctacaggggaagggacgggagggataaagaggagcttcttcaggcttctgcacctttcagagcttggaaaatgaatccactaactgcccagggtgcagaatcctcccaacctcctgcacgacccccaaactcagcaccctctctgaacctgggctttccggggccttccccagctgctcagcatgctgctcccgtctggcttttcactgtgcttcccagtcaggtgcaacatgaatgccaccccatcccaccccaaacccgatattcccactgttacattcttatgaattatttaaagggcttctccatcaaaggccatggagtgtcttccgtctgaattccatgataggtaaccatagattagcacaatgtgaattggtgtctgtgttgaatgacttcggttgaactttcagaaatttcatgtagagatacattagcatccgtaaattatctggcaataggaacgaatggctgctgaatttcaattcaaaatattattaaaataccgatgaaattatcactacaatttaaagtgtaaaaagatgaaaaacacgttctatactttctaagtctccagtcatattcttttactatcttcctgacagttgtttatttatttaattattgagacagggtctcactctgttgctggagtgcagtggcatgatcatggctcacttcagcctcgacctcctgggctcaagtgatccttccacctcagcctcccgagtagctgggaccacaggtgcgtgtcaccacatccagttaatttttttttttttttttggaaaagacagagtctcactatgttgcccaagctggtctcgaactcctgggcttaggcgatcctcccgtcttggtctcccaaagtgattacaagcgttgagccactgtgcccagccttcattacaatttttaaagatgtttatccataaaacaaagggttactgatattcagatgttatacaaggaccaaatatcactgccttcaatcctcctaacaactgctttaggtgtttttaagacttaaaatgtcactcatatattgtattattgaattctagtatttctggtattgtaataaattatagtaagaactttcaaatggaagcccaggatgaaaaatgttatagtttacttttgcccaaattctcttgttaaaattgcagtttcacgtatttgcttatctgcacattatctgtatgtatttttagcctcatcttatgtaataatatttctgaaatagtttagatatgctatttttataaattacattaaatataatttaaaatacatagtatatacaaaataaatatgtagctgtattagaactttataattatcccaaataccagttatcagccatactttgggttacaatgattaataagaagaatttgagatttggggtaaaaagccttagattctagtctcgtcctcttaagttcctttataagattaactagtactgaaccccattgtttgcacctgtaaaactaaataatcatgccttctgtactataggtgagaaaatgtctttgaaaatgttttgggccaggcgcggtggctcacagctataatctcagcactttgggaggccgcagcaggtgaatcacttgagatcaggagatcaagaccaatctggacaacagggcaaaaccccatctctactaaaaatacaaaaagttagccaggcttggtggggcatgcctgtagtcccagctagtcagctagtggggaggctgaggtgggaggaccacctgagcccgggaagtcaaggctacgatgagctgtgatcgtgccattgcactccagcctgggagacgggagtgagaccctgtctcaaaaaaaaaaagaatattttgtaatagtataaagtactatcacatgaaacctcttttttgggtaatgggtcttcctaatagaattaccctcctccaattttcagtttggaaactaatattccagggcttactgagggtatagttaactagagtagaggttatagttgccaagacaatcttcctatttcctcctcaaggaaactgacatcctttcccctagatctacccttcccctggcgcccagaaagctgtgccagacaatccatccatgctgtcccactcggaagtagggctgggccgggccaggccaggccagcccagcccagctcttagcttccccatcgttggatcctcggaccacctctggacagaggaaaaacacccagagtgaagaaaaggaaacaggtggttcaacttcctctgcttagggtccaggaaggagcaaacgtgggcccatcagtgcatgtagcaagaacaggaaccccaccgggtttcagtccagcttcgtctaatagagactgtctttatgtgctttgtcataagaaaagtcaagcagctaataaatagcagaaccgaccgggcgcagtggcttacccctgtaatcccagcactttgggaggccgaggcgggtggatcatgaggtcaggagttgaagaccagcctggccaacatggtgaaaccccatctctactaaaaatacaaaaattagctgggtgtggtggcgagcgcctgaaatcccagctactcaggaggctgaggcaggagaatcgtttgaaccagggaggcagaggttccaatgagccgagatcatgccattgcactccagcctgggcaacagggctagactccatctcaaaaaaaaaaaaaaaatagcagaaccaatattttaaaatgtcatctctcttccagattgctttaatttaggctggagtaggctgcgtgtcctcaggctctaggagacagcttttgagccatagacagagccacagaaagatccagtgtctcctaccacaccccttagttttgtgtgtctgttatgtcactggtgaccagagacacaaggctcctgcagagcaaagaaaaccgactccatgcacacttctctgtgtccccttccagtccccacgcccctctcctgtctcctggcatccctgaccttctaaagctgacttttaaatacctgttccttgaagcccttccctggccaaaccagcaccattgtgatagctccttctctctgcagctccttggccctgaagcaccacaaacatcataaactcacttgccctttaactgttaagtcatttgcatgagttaacttgagcccaagccaacatgaaaattctttttgtgaaaaggtctcactctgtcacccaggctggagtgcagtggtgtgatcacagctcactgcagccttgaccaggctcaagcgatcttccccactcagcccaagagtgctgggattacactaccacactggccccgacattaccagttttgaagtcagccatggtgtcctaccagaggctcagcaagtgttggccaactgaccagtgaatattaccagatcaggggcacagagagacatgtgcagataaaggagaggaaaagggtgagctcagagctggaaagctttgtggagacctggggtgattctgtcttctcctatcactgtcccctcgatcacccagctcacgccccagagagagccatcatgtgccctggtctgtcttccttccctcctcctgaccctttcccctgcttagctgctcctcacccttcacatgtcagtttaaacatcacgtcccacaggatgccccacctgatcaggttaggtcccctatcagttactcttcaactcccctgtgccttgcttttggagcaaacgttctagttcttaagtaatagtcatttctatcactgtctatttaatgtccttcccgccattagactggaagccctgtgaggtcagggaccacatctgccttgttgcctgctgtcgtaagtccctgggcctgtggcacgccaggtatgcagtaggctctgcatccatgtcaatgcagggagctgataggcacaggtgtgggccagggcatcctgcagagtttgatggggtgggaggcagagccccatatccctgagaccagctgggatgaagcctcactgcacattccaggtgacttaaagattcagcagggatgtgtgacagcaaagctttgcccagacaactacagtcccttccctaaggtcccaaattaaagaaaaagagtgacccaaatcaccaactaccgaacttgtgtccttctattcaggtaggtcggtattgctgctcttggctttgcattcagccttttccatcatcaccaggtcagcggtcacagagcatctcccgtgtacctggcaggtactgggtgctgggtgccaggtcctgggagtcaaaggtacgtgaggcctggcgcctccccacaggggcctcacagtgttgtgaaagacagcaatgtaaacaaatactctcactagatgggaacacaggctatacagagagctgtacagggaaagggtggagagggatttgctctaccaaggaggcctcaaaacacttcacagaggtgacaccttgacatctggaagcatcaggaggagtttgccagacagggaaagggccttcagagagagaacagggcatgcggcagagctgcagcgtggtgtgtgttggggtacaggcctcaggggactggcaggagatgaggctgaggggggagggtcccatcatgggcaggcttgggtctccactgaagatattgcacttaattctgcaagtccaaagaaaaccatggcagggttaaagcaagtggatgattccatcagatctgttttagaaagataacagcacgctcccaactagaaaagtgccactccctataaacatcctggcaccatgtccctgagagctccaggagccagctttggagccgggaagcctcactgagctgagggtgcctggcacccaaacggacatccttaaaatgaatgtcacaacaaaactgagagggaaccaagggcacacgagggcctttctaaggactctccaagtgggagaagttgcaaaataggaaagaagaatgaaacagtgcccatgagagtgtctccgggagcatcatcttccgcctttcctgaggagtttcagggcgctgttgacctcgtaggtaaggaggagccgtatcccaggaggccacagctgggctgagagatttagcaagtggaaggcacagccaggatctcgaggagaaatttgatcacggccaacactggctggaagtttaggaattccctgggaactgctgtgaggccagtcattcattcattgagcagaaagacttagcaccatatgggaaaagggtgataccccaaaaaaggactctagccgctgtattcaaatattagcgttaattctcacagagaactccctctcaggaagccacagcaacaccgtcatcagaatgtgccagaaggaaccccttcagtatccacagaagttaatttggaaacatagtgaatagggaaagacttagatcaatttgtggtttctagaaaattactcttttaggactatggagaaaaaagtcaagtactaagtaccagaaatgcaaaatatatgacaatttcccatagatgtgattactattgtcatcacgccatcatcatcaccttcaccatcaaattgtaagtcagattatgtcagtgcttatctgatccacgggcaatggccgaggtgtcagaaaaactacagttcgatggtgactgtttccttcctacgcggaagacacgtgtgctatggtgatactggccttcacctccaggagtctgaaatcatagacatatgtatagtaagatgtgcaaagcaattgaccagtgatttattacaacaaataacgccataggtaactgtcaaataaaagcccattgcgtccggagttccacggcaacgcgtggagatgcctggcattgctctaggtacccaatgtcgtatctgtgtgagcagtgcagtctcgcaaagatggccctgattgggaagaagtgcagccatggcaggccctcagatcgtccctgtgctcaccaccctggccttttctccgattcttgttgcatcaggtagcacctgcttcttccttccctctcccctccagcaaatggtaagctcccagagggcagggccaagtctcatcctctcactgtcccaagtgactcaccagggcctggcacaagggagctgctcggtccatacttgatggatgaatggataagtggtgactaacctaaggaaattctgccatttggcatcttggggatgccttacaagagaaaggcatcatttacagaaggctgcaagaggactcttcagtttatagacctgcatatccaagccagcctaaccatttctacctgggggagctaaaacacggaagttctcaacgtgaatgtgcattagaatcaccagaggagtcctagtcaacctctaggttttctgcacaaaccacgtggcactgggcccaggaatctgcattttaacaagtcccccccgcccattgttctgattcagggggtcacagaacacactcagagaacccttttcaatcaccaggcccctaagagcacaggcttggcattagatagagtcagctttatccctgttctattatatctttactaactgcagggctaagttgcacatggttcttaagctccttctgcctcagtttcctcagttattaaaaggggatgagtacaaactcagagacagaaaggagaatggtgctgagcagtggctcatgccttgtaatccgagcactctgggaggccgaggcaggaggatcacttgagcctaggagactgagaccagcttgggcaacatagggaggcctcgtctctacataaaaaattagctgggcatggtggtgcacacctatggtcccagccacatgggaggctgaggcaggaggatggcctgagcctgggaggtcgaggctgcagtaagccgtgatgacgccactgcactccagcctgggtgacagagtgaaacccaaggattctacttttgggatccttgtcaaaagtagaatggtggttgttgagggcagggggacatggaaatggagaattgtcttatagatacagagtttcagggatttggggttttttttttttttttaggatggagtcttgctctgttacctaggctggagtacagcggcatgatctcagctcactgcaacctctgcttcccaagttcaagcaattctcgtgcctcaacctcccgtgtagctgggattacaggcacccacgaccatgcccagctaatttttgtatttttagtagagacagggtttcaccatgttggccagtctggtctcgaactcctgacctcaggtgatccatccgccttggcctccaaagtgctgggattacaggcgtaagccaccatgcacaggctgcagagtttcagttttgcaagaaggaaaagctctggagatctgtagcacaatgtacatagagttaacactactgaactgcacacttaaaaatgtctaagatggtgaattttatgttttatgtttttgccacaactaaaaagaaaaagttttactggggttggataatggtatctacttcaaagtgttgttatgagcattacatgaaataatgtatgtaaagtgccaggcaacaggccccagactaggaactgctcaaaaaattatagctattattattacagtagcatgggtgttaaaaaatttaaccatgaggccatgcgcagtggctcacacctgtaatcccagcactttgggaggccgaggtgggcagatcagctgaggccaggagttcgagaccagcctggacaacatggtgaaacccagtctctactaaaaatacaaaaaaaattagccaaacgtggtggcacgcacctgtagtcccagctagttgggaggctgaggcaggagaatcgaacccgggaggcggaggttgcagtgagccgaggtaacaccactgcactccagcctgagcaacagagcgagactcagtctcaaaaaatatataataaatataaaatataatcattaaggaagatttcaaaccctcctcaaaaatccaagtagctttttgatgaactgcatttttctaaatcctgaccaatagactatttttcatctcacctatagacccacatgttaaaaaaataccacctaaattataggtggctatgtgagagcctggggatattcacgctaggcagtctcattcataacactaccatcctccatttgcagtgatgcaggaaacaagaaaaatgctacatttcgttttgcaccttaagcttcattaaagaaaatcaagcaaaacctgcgaccatagaagaaataatctcccagtcttgaaaaactacatgaagtgttttttatctttgatgtgcacatggaacccaaagcaggttcgggaacatggcacagactcacagccaccgtttggattctctgcgcaccgttttgatttcctgtgcatctatgctaatttcgtctccccagcctattgtttaaaccctagcaggacagatgtgctgttttacagggccataacccacttggtgggtggataaccaagaggcctttggtcttcatcatttactccaataagaaaactagacgattgccttgtaaaacagcatgtgacccaggcccggatttccacgtaacgccaacctacaggaccacctcggaacttccaaccaaattaggaaaattcctcctggtcacagaggtgaccaaaattagctcgaggctgaatgaaattatggaaaggacaatctaggggtaaaaacagtaaaaacaagagggctgggaagtgacttacagtacaggaatttaggtttaggccacacaggtgttcatgtgagtaagagtcatcatttctaaggctgaaaaggttggccactgctggtaaaaattctaatcctagtaggcttagaatctctctcaatcaaaagataaatcccaaaagtcattgctaaggattccccccatttttctttacctccatcctatgtataaccgtaagttactacctctcagccctcatcatgagagcccagcactcctgtcccggcagccctgagtgacatcagcattgactgttgggaattggtacttgtgaaatccagaaatgggctacaatagatgcaaatggaccatcatcaatgtgcattaggattgccccagccacccccagatctcgaaggacccctgcaacccagtcacaccagcatccttgccaacaggtcgaagcagggtggattaggatgaagggatatcatcgtaagcagcaaaaggaagtgatgaaaagaacacaaataaccagacattaactttgggttctgagcatgctgctttctgtccgtttaatctatcttttgctgatgcacttaaagaagctaccttgtcttcttaatgtggggatctctgatgaaggcttgaagctctgagacccaagcatcagccccagctctggctttccctagtcacatgaccttggaagatcacttctttttttttccttcttttactactctgagcctcagtttcctcatctaaaacagggcttaggttacttgacacagtctatataagtatggtagaagttttttaaaaaatgagtctgtaaaatgggactattccaagagatttcagagatgccttcccatcttaacattcaacagatctatgattcctttgttacagctcatgtccctggtatttctttcttttttgagatggagtcccgctctgtcactcatgctggagtgcagtggtgtgaccttggctcactgcaacctccacctcctgggttcaagcaattcttctgcctcagcctcccgagtagctgggagtacaggcgtgcaccactatgcccagctaatttttttgtatttttattagagacagggtttcaccgtgttggccaggctggtcttgaactcctgacttcaggtgatccgcccgccccggcctcccaaagtgctgggattacaggtgtgagccactgcgcctggccgtccctggtcactctaatcgtcttctgtatgggtttaccaacagactcatctctttgtaccctgtacaatcctaccttgcattttctcataaccttatcatgttacctctcaattatgttacagcaaggaggtaagattttgccattagcctgatggtacaattttttaaaacaataatcagttgccagaatatattcttgcttttaaagttctacataatatttcaaaaatatatagggaagtatttagattttccttccacagctgttttctgcttgatttcaagagttaactgaacagtttgctgtcttgtgtccaatgtgtttctcctctccattaaaatgctgaagatttttatttttttcccctctttagggggaaaaaagaagtgtttcctctgtaatttactttggctttctcaaaagttgggcgggaaagtcagtataattcaggtggaatctaaaatgttcttgttgcacaagtgtgcacagaaaggaaacctataatttcgagtattctttcaggaagtttgtattctctgttttccagggggcctttactttccaagggagtatgatcgacatgccattactgaagcaggcccagaacactgttacgcttgccacctccatcaaggaaaaatgatctgttaaatgaagctgtcatcaggtgggctgaacatatacagtggggttcttaaagacaaaccacaatactcaaagcaacttgttaggatgccagattgggacctgactccatttacagttcatgttaatcacaattttgttgttgttgtctcactggccagttattcccctaaaaaaatgaacgcttttccctttggatccaagcttatgattttatcatttttagtgtattacgaatatgggcttatgatttcacagggaggtaagatcctggggaaagatgggctgtgaggcgaaggtaggtctttaatgaaatggatctttcccaaatagacatattccctccacccttctcatgttagtaaatgtttcctgcttgttcatttatacagctgacaccacaaataattttaagaaaagccaggcctttaaaacatagtagcaacattaaggggtcatctctatttcactagtaatctgataaaacaacagagatggcatcaaaaaagaatactaagtattatattggcttaaaaagacactttctgaaaataaactttcgaaactggttactattaacctccacccctaaaacgaaacatccatctccttgaaccgctagacgatgaacacgaaagctgtcatcctgggtgaatgctgtgagtcaaccattaccggcaattaaaaaataaatgtgcagaaacacaagaccatccattctccccctttattttcccgtttaactgtttgccattgaggctatttccccctggaaatgtatggctgggacaggactccctcagtcataaacttgtagcgtctcagaagacacaatgcacccgagctggtgcatgtggcccctgcgagatttgcatcacattagagatgcggctgcaggtcagatgggtggtgtggttaacgggcttagtaaagctgttttgaagaggttaacccagcttgtagtaagggtaaataaacataacaaccagccattgttccctattcagcatgtactcttatattgaaggctaaagggtattgaagctgcagagggatcaacttgtgcttgccagaggacgccaatgaagtttgaaacaccaacaatcagagattttgtttctgttcctcattaaatcatgagcttttgtgccgagactctggacgactgttccttaagaaattaacagaatgggaagttttaaactctacaccaaccttttcatgacctacacagcagcaacgctgctactcttagacaaacaccgcggggaaggctgttctgtttatttaaatttgtaaatagaaaacagttgttttttactttcatttttcacctcctcctacgcccttttggattatttcctctgcggcccctagcatgagccccaaccaggcctccccttttccccacttctctcaattcccacaggaagcccgagaggtgaggagctgaggttagacaccaggagaggcaccatcacacaaaagcgcggccgcagagtcccaccgccaccaggcgacccccacccagagagggacagacatgcggggagccagcaccgggcaagatggctctggggatcctcattctgtgaagacaccaactcatttctcaaacacaggatccaggagacagatagctcctaaatggagatggcacatgctccgtggggtccctcatagaggagtgccaccctccacactggccacgctgggctgccccagagcggccagaaaggaaggtgggagctagccccatcctcactcagaggccggaaggaggaagatggcatctcgccaacttcagagccgaatggcctctagccacactgcttccagaccccagacggggcagcagcagcagttcccagaggagcacccattgttgcagctaggacccaccaaggatgggactcctggagtcaggtgcacaccaggtaacccaggaccacgctgtgcacccccagtctgcccctctgctcagaacacagagggatgggaggatggcttggcagtgggaaggcaaaagaaggcctctctcactctgcccctgccatacgcacccgctgagggtgttagaagcagtggaggcagagctggccctaagcaaaagaagaaaataaacctcaccttgtccttcctatgggcagccctcaccccaatctaactaaccttcccatcctccagcctaatccaaagaagcccttggcttgaggggatgaagggcttgcgttctagtctccaccccagccccacaggcagccagccagccagccccacacagaggggcctcctcaaggcctcactgggagcctcctgtccccagccaaggagccctacagacctggggaaaagcaggcccctccgcaaggcccctgggtggtgcggaggccggaccggctaggcctcccgctgctggccactcccaggccacgggttcctaggtcccaaccacattggactgctcgccacgccactgccctcatcccaaactgctttgttcaaacaaaaccaccttgtttcagtctccccaaatgtccagttcattatcttcctcataacccatggtccctattagggtaggatcatgagactaagacctatgagagccacaaatctggaccaaagtcccattccctgaacagagacccaaacgacgagggtcccagaagagagttcagtcctgatcagaaacccatggtgccttagtccttgaagaacaaaactctaggaagaagatgctggaaggcaaagggtattccccctctttccccacccgcgtctctgtggtgccatgggtgggcccaggtaccctgggaaaggtgggagagcagtcaagggtgggtgtgtgatctccactgggctcactgggcacccccgacacggggaagtgagagctgcccgactcctgagccaggcgtgggtgacaggaagaggaccttgcagctaatctgattcattagaaaccatacctgtttatgttttgtgtagctcatcacaagccgcttagccatatcacccccgttattaattcttggggtctaaattatgggtaacactattaaaacattatcagaactaatgagaaacaattacttagaaaatgagccgggacaagactgagttgggaacatcagtggtgatcactgtagattagtttaataaatcatcaggtgcaaggcaagactgactgtatgtatgcaaagccccgtcacgggaaaatgaaattgagattttttttttttgcataattttttcattaatctcaataggacccgtgtggtgtagattgctttattcccctaataccttgcctgaggcgggggggggggggggtgcccaataatgtcttcattgttttactgaggtcttaatgacaatctgtgacaacctcattttaatgtatagaggattatatcaatacagtcatgttttattgaaatggtgaagggaactccagtcagagtcaggcagtgtctgtgagcacaagttaggaagtttctcggcatccgggagcgttcccgtctgatgtcccagtgttagtcctcccggccgccctcccctcctctcctccagggacggctgggaaaacagtcctgcgggatgaagacttcaccgcctccgatttgaatttgaaagtaactccttccgtggcatatttcgctgggcagatagaacaaaccatgtcgttttcccccgtctctaaaatagacatattattatcattcacacttttgcacccggtcgttttgcgggagttcgggaaactgactttcttcattggggacattgtaattttctgatgatgccacgaggagaaaaaaaatacgggtttgttttaattggaaggaccttccgcttttatgatttcggtttaccttggaaaactgaatcttctgtgttttatttctttcctctagtactagaaaagcaatgaattaattgcacaaaacaggttctgagacggcccgcaggccccgagctcgtggacgcggccgagggtcgggtgtgacccgcggagccgctgccaggcttcccagctcgtcttcgcggggaggcgggaggcaggaccagaccccagcatttcagcgtgaaagtcttcgcctttctttccgcgctgtctttcccgcgggcggagcggcgtacctgagcgcggtccccacggaggatcagtgactttcccagaccccgcgggcgagcccgcgcttgggacccggcagctctgcgcgggctggttttggagggggtggtgttcgtttgtttaaattccagttgttatttggcagcatatcgccttccgagtcagtaagaattgcccacgacgtaaagagcgacttgcaggaaggggccgaagccgtcgttagcgcccgggcggcggcggccactcgaaccccgtttccgccaagcgcgctgcaacctgcggggcgagttcgttttgttttgccaaaatcatttggggacttctttgtcattcatgcccttccttttaaatgatttttatttttttccactgtaagtgaccggctgggtttgacttttgcttcttccgacggaagggcaccgcgagccggggtgggcggccccgcgggcaggaggagcgcggggtacacgcggtggccgcagacgccgagccctgcggagccccgaggcctcgtcgcccgcgcccccggtgcgcgcggagccggggccgaggccgggccaggaggagtgtggcggcccaggaggcctggactgtgggccctgctcgcccgcccgccgcgggccgcccggagcccgcgcgcctgtcgcgcagcccggctgtaatggtggcagatcaaaggcggccccgtgtccccgcggagcccgggacaatcccgcgcctttgtgcgctgttgctaggagcccgagaaactaagagaaagtgtcaggagcatgttaatcagactcgttacactgtaacaataacgtctctctcgggtctcccaggccccagtacccccgcgcaccctgcgcgcaggccggacacctgcgcagggcccttgcgcccgccctggggtcccgccggccctggggtccctgcagccccgaatccgcacccgagccacgcggaacgactagccccgaggggccccgcaggctcccggtgcagctccctggtcgtggtctccttgaccgaagccccggcctcacaccgcctggccgcgagcccgagggacgcagggacgatcccggtcccctgcttttcagtcctccagtcgaatcgcccactttgttcaatcacagtattcgaatcaagaggaaaatgaacattccctttatggtagctttttggttatgagttttggcaaaactgttaaatcaactttgccgatttcccttgggaatccctggaggccactctaagtggtaatcccaagtttaagaaggaaatggggaaattttgctgagagtaaagatgtcgccgaactttttgaagggatttgcttcattcattcatttagtcattcaacagacacctgttgaacccgactgggtgccagaggggccagtcacaggacttattccagatgaacttttcttttgaaattagaatgcccttgtggaagccaaaggaggagcagaggcctaaaataatgtcaagtgtcaaagcaaaaagaagtgccattggctactacagtgtgtgatgataacaagagaggtgcgaattaggaattaaaaacgtttgaaaaactacaggccatatgctttgaaaccagccactttttccatctttcatctccctctcccctccggttttggtgggcaggagctatgccaggctgcagtcctcaacccgtcagaggcctgcctgaggtctgaggagtgaggccaggccttctgtttgtacacagcctttcaaacgtgcagagagacacactccatcctggccccattccccctttgctcatacgcagggaactggaaacctgtcctcaagattagggctgaatttggccaagttaaggtgcttttctcccatacaagctcttgttcgagaacaaacccattctggaaggtatagaagggggccagacttccagagtcaagctacccgcacctaagtcacaggacaaagctggctgtcaccaggatgggtgtaagacagcctctcaactcacctgtgcctaccattgactgaggaggaatcccaaaactgtgtgagactcctctgtcggtgaaactttctctctttcaccgttgcatgcaacatgtaaacatatagaaaactgggtcgggtgcagtgacttacgcctgtaatcccagcactttgggaggctgaggtgggcagatcacttaaggtcaggagttcaagaccagcctggccaacatggtgaaaccccgtctctactaaaaatacaaaaaattagctgggtgtggtggcgcatgcttgtaatcccagctacccgaaaggctgaggcaggagaatcgcttgacccgggaggcagaggttgcccaagatcctgccactgcactccagcctgggcaacaagggcgaaatgccgtctcaaaaaaaagaaagaaagaaagaaagaaaactgggcaggttccctggggattggagccccaggcctggaaggaactttagagattcctttcattacataaataaaggagttgatacgctgaaaactccatcttacaaaaaacaagagaggccgaacactggctatgtgatgatgataaaatagctggctaaaggggagagattcagtgacaagaaactggatttctttggtttacataacgccaaatagctggtttggctgggttctgttttgtttttaaacacagaatcaaatttccttcataatcagacacactaatagaatcaagagaaaaatgaacattccattttagagagctttgtggtagagagtttcttccaaagactccatactctaggcatctggcttaatgttaaaaaggggcagggggatggtcttttgagttctgtgaaaggaagaacgtaaaaaccaacatgaacttctggcttcgattttctgggagaactgtgctggctaataacccaaacccccaaatgaggacaagggcacatccatttttccccatctaatttccagggcctggaattcgtgcggtggctctcgggagcttctcccaggctggcagaagggagctccagctactgcctgcccccgcccctgtgtacccacatcagtgacagcatggctctctcaag

SEQ ID NO: 111 - DNA, 269592 bp, Homo sapiens
  source 1..269592: mol_type = genomic DNA
tcaacacacgctgcacacattcatgtgttcactacagaggcgccttcacttaaaaaggcaaaaatctagggttttaacgttattagctgcaggagcacgtggagataagaaaacctggctgaggagctgagcatttgctaggtggccttaggtgccggctgcttgtgatggcagaaagggagctttttgcatccaggctgcagttcctgataccctgggtcacaagagaatcgaatatggttctctcgtgggctggtgctgggcctgtgaactcagataaaatgaccaggtggggtcccagggaaggtgaagtagggggagctgctggggtgcgcacaagaggggtggctgtgtaggttggggggtgctttaagtgggttcctagaagaggctctgtctccctgggcagaagaaagaagggggatgggcggaccgtcccctctctccagaaggtttgaggacccccaaggccaaagccagcagacgtcaaaggccaggagttcgaggccggctgggtcccgcagtgggagacagggcagggtgggctcatcctccggatcaccgcggggacactttcagtcgggaaggcgtccccgtcccacggccccatctggccagcccgctggacagcctggacagcggagggggcgtcaggggtcgagggttccagtccccgtccttccacccagcccccggccctcgggtatccttctttacccgtccgagtccggcccgggggcggcgggggtgggtgaggcgcgggcccccaggctccggcagcctggctgggctcccgcccgggcacccgcgggggcgcggctggcgtgacgtcacgcgccccgcccccgcgccccgccccctccccacattccaggcggggcgggccgggaccccgcggggctcgcccgccccagccccctccccaggggctgcccctcccgtcgggccgcgcctccccgtcgtgggccgcgaccccgcccggaccgcggactccgcccgcgagaggccgaagccgccgcggccgccgccgttgccgccattgacgtcagaggggcgggcacatgaccctgcggggaccaatcgcgcgggcgccccgggctccgggagcccggcgcgcggcccgccccgcccgcggccactctcgcccggacggccgcgcggacacacgctctgtacacacgcgcgcggcggcgcggggccccgagacacgcccgcccccaccccgccgcccccaccccggcgcccgccctccgcgcctggccccggcccgccctcggcctcccccgcccctccccgtcgcccgccgagcccggtcagccgccgcgagcatgcacccgacgagctaggaggaagcccggagccccgcaggaagcgccgaggccggcccagcccgccgcacgcgccgccccccgcgggcagcgccccctcccctgcgggcgcccccagccccacacccccccaccttcccggggggtgggggggtgcgggccgccggatccgggggccccgccgccccagcagcccaggacagccccctctccccgcccccagccccctcccccggcgcggccatggatgtgaccagcagctcgggcggcggcggcgacccccggcagatcgaggagaccaagccgctgctggggggcgacgtgtcggcccccgaaggcacgaagatgggcgccgtgccctgccgccgggctcttctgctttgcaacgggatgaggtacaaactgctgcaggagggcgacattcaggtctgtgtcatccggcacccgcggacctttctcagcaagatcctcacctcgaaattcctgaggcgctgggagccgcaccacctaacgctggccgacaacagcctggcgtccgccacggtgagtggctctgcgcggctgcacccccgcctctcctcggggcccgagatgcgccctccctggctgccccctggcgctgcacctggagcccagggcctggggggcggtggggggtgccgggggaacggggagaaccagggcgcctcgctcctggcctgctcgcggggctcgattttggagtctgaagcccaaaccagccgaccgggctcaggagagacccttaaaatgctggagactcggcccaccgccaggctgggtgcctggggaccttctgcccccagctcttgtgtttctggtggctgggactcgaggatggacccgacgctgggccctgatggtggtgggggttctctctggaagcccctggcccatctggatctgaggggtgggggaggggaaaacaaaataccacccctcagatttaaaaaaaaaaacaaacaacacaacaaaacctccaaacccccaaacccaaagaatttccagaagccagtttctctgtttggtttacccgtcctttattctctttcctgccagggctggcaggcagaacggggtgcttccctttctgaaaatctcattcgcacattgagaggttggaagtggagggggagggggcagtggtcctggaatatctcaggacccagcggtggtcgagttctagcctagaagctgcttggtggagccctggtccggcattgtctgtagagtgtgtgtatacgtgtgtgttttgttgctggaggtttaattttgttattgtttttaaatacatgggtaggactgggtcagctggatgagtcggagaggaaaaaccattgatctgtttctgaaatcagatctgcaaatggtggccttcttcgtacgtggagaaagacagctgtggtggggtcgaggggagagtgggggtggcgggtaggagcctgaacaggatgctttgtgttttgaaacaaggacagtttcaaataccggctgtggcttgggcctgaggcttgccgtgggggtcccatcctcattgggggtgtagcttgtcttccccagaatgcacactcctccctggggccaccgtgatcctgtttactaagcgcagtgggagggggccgaatccactgcctgcccacacctgtgccaagaaaacccagccaggaaatagggtgtcgcttacatggcatgtcacaaacgtgtagcgtgtgtagacatttccctggcatccatgttcccttggcggtgtgtcacaggccatgacacatgccccaaggaatggggaggggggaaaagttagctgaagaatcctactctttgaaccagtcccccaccccccaccccagagcgttgcagccctcgaggacttttattcttaatttggggtccgacatgcttagagcacctattttctctttcctgtgggcacgttggtgcaatatctgcaaagactcctttttcagggaggattgctggtcgcggggaggcggcccagtccccggtcaggctggtgcatgttctcaagcccgtcccgcgccacaggccgcagcatttggctttccaatggatggaggcgggagagagcctccgaaaatttgccagtacggagtgtttctgatgtggggaggaactggtgaccgcggtgccccctgcctggattctggagaccccagatctggcttcagaattttcacctggctcagggggactttattgggctttttttttttttttcctcttacactccacaaaatgaagggttgttggtggtggggtaggaaaatggttagaaggaacagtgacctgccatgggaaggccaggaggagccccttctccctctgggagaagccaggagtgagtgtcccgctgctaccgtcctgtttccggaaagccagctctcgaggctaatgcctccccacttacctccgattgctcaggaggtatatctgagagaaagagggaaggaagaaagacctgaatagccagaggcccctcgctcaccttggccagcccaggtaggtggcaccatcggtagtgtgggcctttccggaaagcacctgtctagtactggggactgaggcttatccatggagcaagattctcttggcagagccatgctctggtgttaggaaatgtggcaagaggaactataaggaagtgtttgatggactggcataatcccctttccgctgcctttcgtcaccaagcactacaggcagggggtgtccttaagtcttacccttgccctctggtgggctccagggggccttgcctcagggcctgtgagcctggaggtggggctgtgagggctggcctggctggagcgctggcctcccgggtagaggtgaggttgggactgccaccagggctctcgtcccatcatgagacacctggttggtgtccaggctctcggggaagcagcggagcccctgtggggtttccctgaggcctggacattatgtaatctgtctgcgttttatagtgcggcccaagcactctattgagaaatatgagcccaaataaaacaaaggtgaatttgagtgcagttccctagaacaaaaaccctttgcagtcctgtggcttcgcagcagccgctggcccagccctgagctcccgatattccaagtatgtttcctatagagtcatatccttacttgaaatatcagtcatccatattttaagccatctacacagcccaactcagaatcatctggtaattatctggttaattgtatgggcttcaggaacaagacccagagtgattgatagggattcaaaccaataaacaagccaaatactcttttttgcccaaaccttttgcagtctgtttccattgatccaattaaccgaatctgagagatttaagaccgtgcttccaggagcacatctgcatcaggctgggatgcaggcagactcgggctcccagtcccacctgctgggtgacaccggctaggtacaccttttagtctggggtccaagggacctgatagccctccaggctgtcttaccggtggagccagcagcctcacccgcctggcctgcctgtaaactttgcctcctgtgggatcaggtcgcagcttgccctgccctggtctcctgggccagttactgattaaatccttgcagagccaacagcgtgcctaatgtggcttgtgacggccgccaggtctgatgcaccctgtgcttggagactttggatccgaaatgctcgtaaacaaaggaggaagcagataggcgacagctgacttgggaggggagatagggaggccagggccccctcccttggggacccaggactgcacctttgtggggaagggcctgtctgcccaggctgtggcctgaatgtggtgccccattccctctttgtacccaaacttcccagttcctgggcctcactggctcttcatggctggtgatggtcgtgttggttgtaaatgacagccagggcagccaggggttctgcataagcggccgggttcggcaggaccagaatccattttgctgctctcgtctgtgggttgaatttgatcacctgctaggcatgtttgtccgtgggcagagggctttgtctgtaggctttgtttcttctgcaccacagaagtacaaataagctgcctaccttttatttcatcttacttttaagagaatgtggcacacggtatttcagaatggtggatccactcagaaagtcctttattcaggggtcggggcacaggtgacagtagtgttctttattctcaagccataattcatcagtggcttgtttttaaattttcaccactctgctgtttgattgcaatgtttctgggcatcttgatatggatgggaaaggagaagccaccttcattctcattggtttctttagtctggtgttttctgaacttggactttgtttagcacaggcttactgcatgcctactgtgtgtcacttgctgagctaagagttacacatccacatggcttggtttctacctaagaattaaaatctatgtcctccagggtagtcacagatcccacgagaactcatctgtgcccacatgcacgcatgttaattgctttttcacttttgttacataccccccttccccccatgtgcctagcctgcctttaatttatttgatgtttttttgtggcagtaaacacacagatttccccccccccctttccatgccatttgtcataggaggattttggagtgtatcaaaattgtttcctagacaacttgtctgattggaggtggtggaggggaggggctgagacagagaggagaaaaagtcaaaattctctgtaaattgcaaacgtggtctgcctttcccaggctgtaataagtaagtgcattttaaggaaggagtaagttttgatgctcgcatttgcctggtgcaatctgagatgcctgttccggccacggcaacatcatgccagtccaggtggaaggaatttcactgcatgtggctgagctttcctgcaagtgggtgacagaggtggcagttgctgctggcttgggctgcttggcccacagattgactgatgtggcggccctgcctgctccttagtgtctcatcgggcagtgagagggcatttctggggcactgtcctgggcagggctcagggggacctggtagaaggcaaagctgtcccagggtacctcaactgctgccagccaggactgactcgtcttgaaggtacccaattggtgttttgttggcatggacattgcagggggtcagcttacacctttgattaaaggaatacatgagattaggtgaggcagcctgatatggggcatctcctctgtgggggagaacagatttgggttttgcgttctcatggcgctggatctggatttgaagggtgcagtttcctggctgtgtgacttttggtgctttgctttcccttgctgggccttgtttttcctccatccttagggagagcacctcatgtctagggttgctgtaaggattggagaggatagataagcacctactagtatagtcagcatacagtgaccaggattccaattcctgttttgctaattgccctgaaagagcttcatgactttctgcacaaatggaagggattattgttacctaaaaatgggtggcctccagagagttccctgagatgaatagtgcattggggaaagctaggggtgtttagcaggtctcataggtaggaaggcaatgaaattcttgccagcagtttaagaaaaattccttgcggggcgtagtctagtttcttaaaataaattacaaaaattgaaatactcatgtatgcatcaggtagatttgattagtataacaaggtgtttaatgaaaaatgaagcttcccttactcgacgtccacacagcccctagtggccctccttggaggcaagcactgctgctcatttcttgtgtatctggacatgcatgcacacagctgtctaccgtggttcttcactggacagtatattttggagaccctccatgcgtgtgcagctgccttgttctttttcattgctgcatagtgttctgttgtagaagtgtatcacagtaatgtaggtagaccctcccctgttgatgggcattgaggttagtcccagcctctttgatatggtttggatgtgttcccacttaaatctcatcttgagttgtagctcccataattcccttgtgttgtgggagggacccagtgggagataattgactcatggggcgctttcccccatactgttctcttggtagtgaataagtctcacgagatctgatggttttataaggggaaacccgtttcgcctagctctttcattctcctcttgtctgccaccatgtaagacgtgcctttcaccttccaccatggttgtaagttccccccagccacgtggaactgtgagtccattaaacctctgtcttttgtaaattgcccagtctcaggtatgtctttatcagcagcgtgggaacggactaatacactcttgttccttgaaagaaaacattttctatttttactgaatggagttgtctctattttgatgttcttttgcttaattctttgggatgggggagctgagcctccttttgaagagggaagggcagtgtttcctggggttattgctacctggagtcatgctttgttctggctgaaaggtcaccaaccagggatccccctcagagggtctggccacttggtcttccctgcagctgaaggaacataggtgaccagggggctctgacaaggatgcgctgacttccacccacagaacaagggtctgtgcagctccacctgagggcattgctttttgttccctgacttcctgctttccccaggatggaagccaggccacccagccccatggtggaggaagagaggaagtgagagtttctcttccttgctcctggctctggtgatgaaccacccagtgtattcaacaggcaccgagggagactgtgcgcattttgaaaggaagcttcgcttacatcagcagagccctaaccgaagggtgatgagacgtgcgtgtgggggaggtgtttgctgtgtgtattgaggcaaaggagatggcagagaaaatatttctggtgctgaaattggttcctgacttcagtagccatttcgttacccctcccatgtgcacagcgctcgtcctggcatttggggtgtgcagtgaggccacaggaagagaacacggcagacccagtggagtaggggagtgaggacctggactttgaaatcagacaggggagcttgaatcctgcctctgcagtgtcccaggtggtgaccttgggcaggtcccctagcctgtgtccttatctgtaaagcgaggatcagagaaacttcctcttagcattgatgtcagggtaaatgaggtgaggcctggcggtgctttcatgcctccattcagcagttaagtgtcaccgttctaggcactcggaagaaaacaggagcctgccctcgtggagcctgtgttggtgggagtggacaaacaactaagttaagagcaagtaattataaaatccgatgacagggatcgtggagaaaagcaagcagggtggggcgagtggtgggctgctttgtacatagtggtcagggaagcgggtgataggacttccagggggaagagcgttccaggtagagggaacagcaattgcaaaggccctgagggaggagatcatctgtggaaatcacccagtaaagtggcttgcacctggtacatgttctatgattgtcagtttccttcctcctgctctgtggagctgttattatctgtttaaaaaattaatgagtatgtagaatgtgcgaggtgatggacacacaggcagctccttgccccgtaaagcttccattcttttgcttctgttgtgtgttttttcttttgttttttttttgttttgtttttttttttttttttttgcaaacctggctgcctcccaataaatagtgaagaatagccctggtagcagtgccttaagagattcttaaatgacaaagcccagcagaactttgaaaacgcaactccctttgtccataactacactctaaggatcctaggatctagaacacactagtgctctgattcacctctggttttgccagcgaggaaggggtgaggggaagtgtgtcggcaaagacccttgcagctggctcagcagcccacctgggattcaaacccagactcctgccttcccatggcatcctttgttcgtggctctactgctttcaagctactgtcagaaatggtagggtggacggagcgactaaactgattgtgctgggcgaactctttttggagggaagcacgtggtctggatcgtctggtccctggtggatataggatttgagtgtatggaatcaaacagccatctgggtgcttcccttgggctgggctggctgcatccagctcaggtggggtcatatggagaaggaagatcacaccgggactgctgctagcttctctgggtgtcctgggccagtgccagtttccttagaggtccaggatatctgaaaattggagcacacagtctgagcagacccaggcctggctctcctccctcgcatgttggctccctgtgtggactaggtgaccctgtttaccaacacacacaccggtgcgaggctctgcagggaaggagagccacgggtatggaaggggctgtgtgttccccaggcaggctagctgccgtaacacgcagccctggcatctgggtggcttcatgcagcccagttcttgcagtcctgcaggggtctcccgagggttctgccccctctttttcttgtgaaatgggtctgccctcccctaggtccttcattgtcagggggatggggaaagagtgagcaccacagccaagccgtttgtagatctggccgcttggttggctagaactcagacacacggccacacggagtgcaggggaagacttgggaacatggtttacatgtgcgtctgggaggaagaggagagcatggaagcgatgactactcccaccccagcatccttgggatgcagcagcagatcttgaggtctccagggtgccaagagcagagctgcttccctagaaaggaaattcacatgaccgtgatctcatctggttcctgggtttgaggttgggggcatttcggccaagcttgcagtcttctctggtggggaataaagtagggtgagcaaatccgttgtaagagatggacctatatgttcctggttgcaacgatatttatcgtatccctactgtgtgccgggcacagtgctcatttaattttcacaacaatcctgtggggtaggtgtttattcccattttacagatgctctaatggagtctcagataaagagagctgggaggaagtagagtttagtgtcaaagccaggtctgaccccgtgtctgtgtgggtccatcaatgtatatgcacctggtagatgcacatgaaactatttcagcctcctgcagaaacatcttaggtagaaataagtgagcttttcagtttagtgtttgccaaggttggcggacattcctttgtgattttgtcaaaaaagttaagggaaccgatgtgggaaattgaatgccagctattcgtaaagggtaagcattaggtgtataacttgaacaccatatattatttgtgcaaattgagtgttctggggcactgttcttgcatagtgagtgctctcaggcatggcacttggaaagtcagacatactcttccctcccaagggactcatagttaaatgggggtattacaattatgatacaccattgaacaaagcacattgcttagagaggtttatgtcttgtcctgtgtttggacggaggaagagacgccatcatgggggtggggagtttcaggaaggacttctttgtaggagacaggcatctggatggagaggtaggatggagactgatggagatgagggtggcaggtcggaggtgggaatgagcagagggaacagtgagcaaagggacaggccagagcggctgggcacattccgggagtctgtgcagtttttatggggtggacaccgtaagacggcataggaattaaagatagaggtgggtttgcctcctagagcagagtctaccagtgtggggtgattaatgctgggtaaacccatgcaccctggggcgggtggtgctttacgatgcagagagactaaggactggccggccagccgggagcccgggatgtcacagattggaaggcttaggagtgcagggatctccgagtcgccaggaccaggcagttagtcacagtagtgaccgtgcagcggccactcgtgtgattagtgtgtttcctcttgccaggggctatgctatgcaggttttatcagtgatccgtacaacccagttagatactgttactctctccattttaccgatggggacactgaggcactgcccctcaacagacatagtttggatgaatgaacagcttgcctagttgggaggtccgtcctgttggaaggggagagggacccacggagagggaggcgcaagcccagatctctacccctccacttccttgtaaccccacgggcctctggccctctgcgtaagtgcgagttctaccactcccctgctgcagggctctgtccgtactgaaagcaggggattgcgtacatggtgtctccaacacatggcccagctgtggtgcacacagcctttctcggtgtgcacacaggccctaggattccgagcccacccctgtggcctgtgaagagtggtggtaatggcgtcaggctgctgggctcagcctggtgagctcctggtgggctttccactagagacccctgctactccaaatcccaggcctgagctgtggctcacaggacccctttcttgaaccttcccttcagggaggcctggtgggaaggccctgcctaggcctgtgctgtctcgaaggtgatcccatcaggctggacctcagggccagggacacagttgggcaccttgtaggcgacgcaggagtggcactctgcctcttgtctgcagtgggggaagtgcagtggggtctcagctggcaggttacaggggcaggtctgcccattggaaaggggaatgatgacttgttgacatctgtttgtcgccctggttggttcatgtttcacgaccctgtgactgaggcttgcttcagggtaggaaaatggaagagctcgaactgtcccagcaggctggtggcaactgagctcggggagtcccagcagggccagacagagcccagagccagatgatagtcatgtccaaggtgagtggaggggaccgcggggtaatcatgaccatttcctccagtcattctcagacctttaggcgtgtgcgcatttcgtcctctcatcagccccgtgaggcgttagcaggggaaatggagacctcaagagttcaaggttacacagctggaacccaggcagcctaactccagagccagtggcctccagatgtcacgacgagtccctggtggggtgtgagcacaggaaccctggcagcaagggccgaatcaccagcaaggcaacagtaaggatagtgagcacttacccagaacctgttttatgccagacactactagagccctttgtgcagatgtacattcatctaatcctcacgatgcccctgcgaggtggtgctgtcattgtcccccttatacagatgagcaaactgaggcccggagaggagaggtccctacttacccagcttgtaattgtggagcgaggatttgaccccaggctgtctggctccagagtatcactgcctgtggctggtaagcagagttttggggctgcaaagcagaatgtcagaaaggcccacagtggccaggctggctgtgagctgagaggagggccttgtggaagggagagcgtgtggacagagcagaagggtctaccctgactgcactggggccccttccgggagcttcctgggccagcttcctgcagacccatctccggaggagccgtggcagaggatcgcttctcacctgccctcgttgaacctggggtggtcacctcagcctcctcgcctgagaccacctgaccctgcagagcgctctgtcacagccggtggtgaggactggatcacagtgagcacgaagttcaaagtctactgtggagcgagcgtcccgccctgtctggcttctggcctcagcttccccatgcctctgacctttggcacacgcctcttctttctgcttggaacccctccgacccccccgccagtcagtggttttccagggctaccttccccagttggagccagggcttgctcccctgtggcgcggcaccaccccagctgggcagccaggtcgcctttgcctcttgccttctccactccacatttacctcccctctcttgtaaaagcaaaactgaagccatcatacagggctgacgacaatcttacaaaatcaagaagaaaaaaatcctcccagaatcccaccacctggaaatcacccgtattaaccatgtggggtggagccatctaccctttctcctaaatgagtgcgtgtggcataggtacacagggagcaggaggagcttttattctaggttggcctccacctgccaggtgctggcccactgctccccacagttgtaacaacccgtgatacgtaacaagcaggctctgccacatgtccccggggggccacattacccctggttgagaactgctgtgttcattcatttaatcatcacacctacctcgtgaggtcccattttctggagcaggcaggggctgcccgggctggcatgtgacagagctgggaactcctgcaccgtcccacagtcacctcgtctcttcagaactggcccacaggaggtctgaaaaacaatgtgggggccttaggagccctgtccccatgtctggcatggtgtggggccaagagccggtgggccacggcaccccaggcccccagaaggaaatcccagctggcctgggcgttggcaagctcccccctacctttgatccctcccgactgacctccccctcgctgtccctgccttcgccctgatgactcaggacttcagagatctgggttgttgaaaaggggaattacatcatgccaataagagagagggggagaaattagcattagaaagttttggcgtaaggaaaaatgacttcaaaacctgcttcttgtgccctgtctgaattgaagcaggtttttgggggagatgaggaagtggggaggagaggggatagggaccctggcttctcacctcttctaaagaggccttcatctgtttgaccccagacccatccacggctgggcagtgggtccctctcctttttatagctgaaccccatcacctggaaggctattaaaaagcaaggttctggagttggcatgcaggttctacccgcaggcttggtgaaggggggtaggggtcagggagcactgcaaagacgaacagtctggggttcttctgttgcccccagtggtaagcagggcaccctctctgggccagcacagccctggctgggggcatgactagaggaggggatcccggctgatctcagtcccactggcctccactgggtgctcctgcgtagggccctccctgctcagccattctgggaagctttgcttgaaggggatcaggaaggaggaaaccccctgcctccactttgaaacccgcacactgtttccccattacgtcttgcagggaggtggaggcgttaaatcccctgcctgcccaggtcagtccttccctaaaacaggacagtgatcgggcaggttgattaggagggctggccaggctttttgatccagacatttcatatgaggccatttaaccagtggtgtgatccagctctcagtttcctcatctgaaagctggggatataagagtagccactccctaggataaaggggagaatacatggaattctgagaataaaggagagaatacatggaaagtacttagtagagtgtggacacgtggcatgtgctcaacagatgtttgctaccatcatcatcatcatcatgacccctaccattactgtcatctccgctgtcaccatcactgtcaccatcaccgtcaccgtcaccatcactgtcaccatcaccatcaccatcaccatcaccatcactgtcaccgtcaccgtcaccatcactgtcattactgtggctaccgcttctcttgtgttgggtttgccacctgtataccttcctgcttcctgcaggactgtgagcttgaaggcagggtttgggtccgtttttccaggaatacccgatgtcaataaaggcctttgtctgttgcatggtgggggaccttggcatccaggctgtgaagggacaggaaagtctcacagttttcttggaaaccttctggtgaccttggagtcaagggaagctcttcttgggtgtgcccgtggccctgtgctgtgaccctgcgctgtgaccccgtgccgtgaccctgctccgtgacctcgctccgtgacctcaggcaccattatttggaatgggctctcagcccctgtcctaaccccagccaccaagctcccaacccaagcaagatggaaacccgccgttgggaggattaagatattattggtggttttcacctcagctttcagcagcagtgcttgggaaataagattttgatctcggaaaatatgatttaaaaacagaattgaaagtcgcttttattttctaaacgatattgcccctgacgcatgcactgcctctgactggtggcctccggtctgagcacacccgtggggtaaactgcgtagcaattccaggggtgtgctctctggattttatagacttccaccccaagcaggccctgcctttgatcccccactcgggtctgcagtgacagagcacctgctttagaccaagcccaggaggctgctgcttctttggggaattgtcttagcctttcccactcttaggaggtggccttgtcagatgccagctgaaggggtcttcttcctccgagccctgctgggctcacctttgaatgccacaaaccaaacccatggaccaaggggactttggccacatcccagtgtcccctccagtggggaagggaagttcctttccttcctgttgtgtgagggctaggggcactgagtccccacaaggcctcaccatggaggctctgagaggtgaggtttggctcccctggccaccccagagtcaacacagggcctgtgtgtttttctttgcctctgggcccatgttctattctttccagcctttgccttggaaaccccaccctccattcttttctgctcccctgccttctgggtgggtctggccagtggagagcctgggggagatggaggatgggaggagggtgagtgggctatttattccctcctcccttttccttcgggttgccagcggttgccatgggtgggtggcgtccctcagccactcctgcagtcatgtcactccctctacccaggtttttctgtaactgctccttcccctgcagtgtcaggcccagggatagaaatacatgggggagaaatgaagtgactgctgtcctggtttgcccaggactgtcccaggtttttgcagtgaaagtcctgtggcccaggaagcccctcagtcctgggcacacttggacggctggtcaccctaggtagaaaaaccatcttttgtgcttcccctgtacgctgcccatgccttaatatattgtccttttgtgaaaatttcctctgccatctgtttcctcccaggaccctggctgatgcaccaggagcttgaggagatggagtggtgttcagagcctcttccctttagagttcagagcaaccaaatgggcatcatgctgaacgtgggagaaacaaaagaatctcttgcacttggactcttttctgaaaatttgccccctgcaaagcaaaatggtggtggtgatgatgacggtgatgatggtagtggccatttctttgcctacccactgtggccttgttgtgaagaactttgatgccctgttgtatgtgatcgttatgacaatcctgtgaagtttttcaatgatgaaggaaactgaggcttagagagttggagtaatctgtgaaggctcaggatgggcaagaggtcccgcccaggtttgagcccagatgcgaggttaccacgcttcctggtgaggtgttttacaactaaggccaagccaggcaaaacccattgttctgcagcttctggcttggattgggtgtcttgttgagtatgtgggcagtggatctgatgttttccacttcctcccatgtggcagggctgtgtgcatggagcatgaggggctggctgggcagacagccttgatttgactgaattcagccatggcccatgttggaaaatgttagcctatttttccttctccatttgccccttccccctttttttgtttttataattagaatcagagccagccatagttggaagagaacttgaagttcatctagttctgggatggcaaataagtgacacatgtgctgccactcctcattgccttgaccgtggtagacattgctaatcaaccctagcgtaattagtcttcccagtgagctcagagacagccactaataatcaattgttgttggcatgcaacggggaccctatttgccattcttgatgtagcccagcttctttcactgcatagattaggaacttaaggcccagagtcgttaaatgaccctcaagggagccagtgggatttttttgaagccttctccacaccagggtgttcgctcttaagagatgattttgggttaaacaaagtgtggtatagaggaaagcacctgggtttgcaaagcagtgcctggatctgggttcacatcccagcaatgcctcttgttgcttgtaactctgggtagatcacatgagttctctgaccctcatcttggaaactgaaattcccatccctacatcccaggattgtgagagtaaatgacatggtatatttatccaacattcagcagtatgtgctgggcaccgttctaggcattgcgtgttgcggtgagctgcataggcagttctcatggagctggctgccctcataaagatgaggctagttttcttcctctttccttctcggaaacccatggaactgtgttgtcatcattatcttttacttctcttctgtcatatccacttaaattttggtccatttctgcatcccatgacttgctttgggaagtgatttattttttctttcattcctggtctcatttccattcttgtgtctgggtggatggtcagtgagtcctttgtcacagtcaccaaaaatcaaaatgacagactattccctgctgaatggatgttctggggtactgggtctagatttgggaatgacatactccctttgaaaatgtgctgaaagctatggatccttgggctggcaaaatggtaagacagagcagggcttataaaacttagcaactatgtgttttttagcatccataatataggcattcttagggattcatggacacctccctctctagggcaataaaccaggctagggggtcagtgacgcttccccagcaggaaatggagctttgcacagaaataaacatgtaagtgataaaaaaaaaaatgtttcattaagtagaaagatcaaggtttttattcagagttttgctcctttggccaggtaagtgtggggctggtccctgcagcgttttctgtacttgcttgagctgtgtttagtcttcttggttatggtgaaatattttttcttttatcccagtctggagtttcaaggttggcacttcttgcccctaaaatgtttgttttaagatttagagcagttcttcactctctgataaggtgtagtgcatcactggagctgcgttgtgattgagtccgagggctgttctgctggaatcaggcagatggtggctcactgctcagctttgccctggctctcagtgtgaccttgggctgcctcacctccctgacctgtaaagcagagggacagagtgaccacaaacccttgatgaccaacgattaaagaatactaagcatgagaaaatatgcccagggagtatccacagaggcaaaggcagtcttggcatttgaacgcctggaatttgggaagtatggatcctttactgagtctctatcatggaggctacctggcaaattcagctgatgtgaatggagcagtggacgatgagtgcaggtctaatgggctccttccttctggataccaaggacttcaccttcagcaatggtaagcaagcaccactaagagaagctgagggttttccttggttgttaacattttaaggaccccaataaacaagtttcctcattgtctttgtttctccccaggttggctggccccgatctttagccacaccctagagcaaaacgtcacttaaatgactagagagggacagagttccttggggccatttcagatttagacatggaatttttctgggataattcctttgccactgaattttgcatttgcatgttctaaagccaaaaaaaggagttgaactttcccttttgtttgcttcattactcccactacgtttggcgggacggcggttgtggtttttattctcagatttgtttttatgagcgtgctgtgcgcatggagtcctctctcctccctgaggattttgtaggacgattcaagccggctctctgcccagctgggtaccgattgccagggctggaccgggtgaaataatggaacctgccatttctcaggcacctatgatgtgccaggcacttattcagccccctgggtgggcagtgtccccgtgttacaagagaggggacaggtaccccaggcccttggcctccagggtcacatggctgtgggttgtggagctgcgatgcaaacccaggtcaggccgactcgagctcgtgtgtcttttcctaggctccactgcttttcctgagacctcaggggacttcccaggtgtcctttatgtgcccactcttgtatggttccacctaaggaaaaatgaagtaggtgttggttggacaacaaggcaggccttggagagttctccttcatttctcctgcccctcagcctccttgccaagcttgagtgcagccaggattttcctagtcccttgagttacctggccggggtggctttttccaggcagccagctcagggaagaagctagggctccatccacctcacctttgtgatcttctgagggagccgcagccagtgtgtaagggaagcaggggtagagacagtagctttgtcattagtctccgcatttcacaggtgagaaaaggagtctcccaggggaagtggcgtgggcacagtgagaggtggctggctaagccagagctcttcctagtgccagcaccttcctagaattagctgtgagactgaagagaggaaagatgacatctggtcacaggctccacatctggtccgatggggcagatgccttgatttcacagttggcgaaactgaggcccaggtagagagactgccccagtcgctgtccctaccccggtacagcatgctgttttctcactttgtctatttgatgatgcaaccaggaaaatcttgatcagggaagagtgaaggtctcattcattcattcattcattcattcattcattcgttttggcagctgaagttctgaggttttaaaaaaatttttttattgtggtaaaatatgcataacacaatacttatcattttatccatttgtaagtgtacaattcagtggcattaaatacattcacagtcaccactgtctacacccagaactttttcatcatccccagcacaaactctgtacccattctctcctcgtcccagcccctggtcactgctgttctacttgctgtctctatgagtttgcctattgaagtacctgagctaagtggaatcatacggtatttgtccttctgtgtctggcttatgtcacttagtgtgaggtttttacgttccccccatgtttagcacatgccagaatttccttcctttttaaggccaaataatgttccattgactggatagaccacatttgatttatccattcttcggtcgacagacacttgagttgttcccttgttggctgttgtgggtaacgctcctgtgaacattggtgcaagtatttattatcgcccctgcttttggttcttttggatatacatctacgagcggacatttattttttaaagatgttcaccccccttacccattacataaagaactcgggtttgttgtagcacagttagataacgcaaataaacagaagaaaaccaaatccacctagaatgccgacagccagagatgataattaacatttttgtagggtgttcatttgcatgtgccgttttttccatccatacttgatgatgctgtacctggacagtctttggtgttgtgggctggatcttcatttagaaacatatataaaccaggcctgaggccctgctgtggagggaggggatgccagctggactttcactaccaccaggttgcgtccttgataggggcaggatgcaccccgtgtctgacgctgtgtcctgctgtgcttgcttccttttcctgttctctgtccccagactggaccccgtacgtttgttaccagtccctaacactcactgtcccaagaaggctgcctcgcacaatgcctggttgtggttagtgctcaataagtatttgttgaatgagctaataagaaatgatcgattgaatgaacgaatgagagaaattccccagcgagctgaccttgggcctggctcagctgaaccgtgagagggcctctctggctcgaccatttcgcctgtggtggtgactgggcagagtgacccagcacggtgagctgtccttgctgtcacctgtgggaaaggcaggggttgtgcctgtggccctggctcagacagcagggccctgtgagttccctcgctccagaccttcgctcagggtcttctgggtgtcaggtgcccggctgagggctgggctgtggggtgaaccaaacacagccccactagaacaccttcgttccagtcggggagacaacccttgcagagaagaagctggtaatttcaggtggcaagaagtcgatgatgaaaaatacatccttgtcctttcctttttcttttcttctctcttgttttcatttgttttttttttactttttattttgtcttatttttttgaggtagggtctcgccctgtcacctaggctagagttcagtggcacaatcacagcttgctgcagcctcagcttcctgggctcaagtgatcctcccacctcagcctctcgagtagctgggcctgcgggtgtgtgccaccacatccagctaatttttaaattttttgtagagatggggttttgccatcttgtccaggctggtcttgaactcctgcgatcaagtgatcctcctgccttggcctcccaaagtgttgggattacaggcatgagccactaggcctggcctctttccctttttaaaaaaattacttcatttggctgtttcttggttgattggaggccagggatgtgcagttgctgtgtttgaatcttagctctgccacttactagtgatgatcttggcaatggttttgagcttggcgagcctcagtttccttgtctgtgtaacgaaagatgggggtgtgtctacatcacagggttatcatgaggcataactgagacattgctcaggaagcacttcttattggtattacttacgaacgggccatgattgcataatgaatctgatggctacatgcttttgaaattacaaaaccaatgccatccaattgattggtgatctgcctgggataggagcaagttaatgcattgaccatggggggcttagcacagcgccgtttccctgggagacttgggctgaaccgaatttgttcagccaaagattctgcctcctccctgggaactaggaacaaaagggccttgcttgaaagaggctgttgttccttcaccaagtttagaaagccaaagttcagtttctgcaaccagttccaggagttatgtggcagggctagactttttccttttttcttgtgcctaattttgggccagttcttctggttagatgattgaggtgaccagaacatacaggaaaataaacagaaacccccaaactgccctttgaagctgtccatcctcgctgggcaggaacaaggatcttcttgggctctagaagttttttttagttgagcgagtttccatcccaccaggcaaggggcttaggcgaggttgtgtgatgtgggcccacgcccttgggctggacgtggacccatgtttgtcaccggtccctaacactcactctgggacctgggcacatcccgcaaccagtctgagtgccccagcctggtgttcccatcccagatgaggcgcttgacaaccttctgccccgttgggaaggtgggacaaagcctgcctagtgaggcaggggcttaacatagagcagcctctatagcagtgcccccagcagcggtgcctctccccctctgtgaggctcccctcagtttctctttaccccgtaaaggcctcctgtgagaagatgagaggatttgaatgcgccaccctcaaaaatggcatttataccccaggtttggtctggaaaaaagaggaatttagtgtttttacttttcctggcctcttctcttttgctcctttatttttttctttttcttctttatttttttttttttgagatggagtctcgttctgtcacccaggctggagtgcagtggcatgatcttggctcactacaacctccgccttccaggttcaagcgattctcttgcctctacctctcgagtagctgggattacaggcatgtgccaccatgcctggctactttttaaatttttattagcaatggggtttcgccatcttgcccaggctggttttgaactcctggactcaagcaattcacctgcctcggcctcccaaagtcctgggattataggtgtgagccaccgtgcctggccttctttttttttttttttttttttgaggcagagtattgctgtatttcccaggctggagtacggtgatgaaatcacggcttactgcattctcaacctcccagactcaagcgatcctcccatcccagcctccccagtagctgggatcacaggagtgcaccaccatgcccggcccttgctcctttgtttctaatgtggggctcctgtggtcctctagtccaggtgaacaagtctttgaaatgcacgatcaggggcaaccttttgggtagctttttggagcccaagataatgagcgggctttcctgggcaggggccagagggctggggaggcagaaggccatggttctctatgttcatctcaggctcccaagcctgtcttcaagataaactgtaaagtgtgctcactctcccactgcccactcagacccccaggtgatgtgtccgttttctggaagtagagcgcaaactcagagagaggccggggctggaattccagctctgcggccccatctgcatgagtgtccctctccttgcgggtaaattgagggcaaggatggaaccttccgcaccttgtagggtgagaacgaagtgagaagtgagcagatatgccccaggcctctcgcaggggcctgcgcgtgccgtgccctctgtgctttcagagtgttctctcattcagcagttaggcatcgtgcctgaagcatgcccttatggggcacctcctgggtaccaggcattgtgctaagggttgggagtgtggagacaacagcatgggagaagagagttatggacaatcggttccagtgcccgcaaacgagggtgactcagggtgggcactcgtgggaagcagcagggtccctggagagaaggctgctgatccaagaatgggtccgctcaggccaggaggagaaagcagggaggagctttctgggcagaacacagcattgggaaagtccgaggggcctggtgaggcctggcacacgctccataggcctcaggtgtattgagtgggctgggggctggtggaattgtggagggcggacgcagtgagctgcctgcatgctggccttgggactttggacttcaacatggaagccgaattacaggaaggccccatgaacgtcttgttctttcctactccgctttgagaggacctaattctttgccccgatttggatcaaccttaggcccaagaacctggcaatggctgagctgatcaggagtgtggggcccagttcgttgccaacagggaaatgtcctctgtccctcaacctttgacgttggtggggaaacccaaaggggctggcagcccttggggtcattctggactagaagcatctagacccaagataatgcaaagaattgtcacgtataggaaaactgggatcagcccaggccagtaatcaaaacagcatgttggaagttctaccttgggctctgccacttgcctgctgtgtgaccttggtcaagtaacttcacctctctgagcttttgtttttcatcagtacaatggggcagatagcggtaccaactccatgggcttctgtgaaggattcagtgagataatgcacatctggtgttagccttgtgtctgacacagagaaagtatacaggaaaaacagagggctcttattactgccgttaccactgtcattgctactgttaccaagattacagaggaggggacctgactacacccaaggtctgaggggccagagagggcttcccagggcaggtgacgtcaggctttggagtcagaccttcttaagttcaggctttgcctgaactgtggattcacagttcttcagagaactcactatgtgtgacattgggcaagttagttattgaaattaagttgagcatgttatttacattctgattacgttagttaaactctacctggaaaatgggataataacacccgacagccaggctgccgtgggagtatcagagccaccaggccagttctgtttgaacatttccctgaatgtcttggaggatgggatggggagggatgaggagggccttctttggggtcctcctgtctgctgcacccttgaccttgtctggtgtctgacagcagcagcaggtaaagagcaggcctcagtgatctcctgcatttcctctggccctcactgggagctcttgccttgcctgacagttcaccaagtactgtgtactatcttgtgcagaaatcatgagcaggaggaagaacaaaccacttcctctacaaccttcagatttatcagacacaacttttgacagtttcagtttaaagagaatttcaaaagaagatgttgaaagcaatagggaaataaagcggcccctggcctcagctctctgctgcttccacatttgagacaaaggcgccgcagggatgctgggagagagccccagcggttcaagaggtgccccatccaggcgccccgtccaggcagcttgggtccagagccttctttgcacgtgcagcctgctggctgtggtggctggggttctgggcatctgcagggtgcttttcatgtcctgggagtagtggcgtttgcacagaggccgggtcacagagacagatgtttcagaagtttgacctcaaaacagctttcttttcccttgggttgtctggagaaagtgctaaaaataaggctggatctgagcaggcgctgctgacaggccacctggaggttcgagtccaccacgaaggtggagtcttggggttatactggctggagccataggaaattgagatttaaaaaagctattaaaaagattataaatgagatcttgctgtgtttcccaggctggtcttgagctcttgagctcaagggatcctcccaccttggtctcccatactgctgggattacgagcatgagccactgtgcccagccaaaattgggattttgtaagtagaaaatgattaaatattggttccatatagtttgtaagtaaacacaattcttgacttcctcatgtgatctcttcgctgtagccctgaaactcctgagatcagtacaaaaagaaatcctttcttgggaaagaaaagggagtgttatgattggtgtacatacacataggcacacacatatgcatacacacatgcacacaggcacaaacgtgcatacacacatgcacacaggcacacatgtgcgcacaaacatgtgcatacacacatgcacacaggcacaatgcgtgcatacaaatatacccacatgcacacacacgtacacataaatgcatgtagacatacttgtgcatatacacatatacatgcatacatatgtacatatacacgtatacacataggcacaatacatgcatataaatatactcacatgcgcacacacatacatgtacacatacatgcacacatagaaatacatatacacataccatatatacttgcttgtacacacaggcacaatatatgcatataaatgtacccacacgcacacatatgcacacataaatatgtataggtgcacacatatgtatacatgtatgtgtatacatgtgcatatgcatatacacgtacaaatgcatacacacatacatgtacatgcacatacatttgtacatgcatatgtacacatacacatgtatgcagacatgcacacagatacataggcatacatatacacatgtgcagacatgtaatacacataccagtgtacacatacacacatgtgcacacacacatgcatacacaaatacacacacacacacagttatacagtagtccactctcatccttgggggatatgtgtcaagattcccagtagatgcctgaaatggtggagagtactgaaccctacatagactctgtttcatcctacgcgtacatactggtgataaagtttaatttatacataaaataagggtgacttgaacacaagcaccatgataccatggcagtggaattgagtacagagagggctgctgagtgactcacaggcagctaggacatgcagtgtggacaaactggacagagggaggactcacgtcctggacaagatgcagcaggacagtgtgggattgaagactaaagaattgtctggaattttccacctaatctttttagactgcggttgactatgggtcactgacactgcagaaagtgaaacctcagctcagggggcactgctgcaggtgcacacacagattcacggacatgtacatgcatatgcactcaatgtatatgccgtgtacacacacactcacgcacatgcacatgtgctctcagtatacacatgtatgcacgtgcacacaggtacatcctcacccgccatctttgaaatctcacttattgcatttgtgtttctgatgtatatgtaactttgggcaagttgtgtgacgtctctgcctcagtttcctcgtctataagatgagattagcagcagtgtttatgacctggaattgtggtcaggattccatgagaggatgtatgaaccaacttgagagcaaggctcagaaccccagaagtgcttcgtgaagatgagctgttcgtatttccagtgtccttcatggtggctcatctggccgcccgttctggtatcctgtgtgtggcgtgccccatgcgtggaggagtggcccatctccccaggggtcccctgggtcttgtaggcactgatcacagccactcacttgacaccgttgagtgtcagctacatgccatgccctgtcctagggtgccccaacatgggccctgctctcaggaacctgagcattcactgggggtggcacccgcaaatgtgtcagccaatcaccagagccccttcagaggtggcaggtgctaggacagtagaggggcagggtgaaggggtggagagatgggaggcccctcaggaggtggcctggaggcaggagctgatcctgtgcagatgtggagaggccgttgggatggtgagtgcagaggccctggggtggctgaggtgcacagtggggtgtggaggctggagggacatccaggggcacatcgtggcatctgtggtgatctgcagcctgcgcccagtactttgtcctgttcctttcggggcttggccacaccgcagctgcccagtgagtgtgtgaggggctggtctgtttaactgcttgccctgaaggtgcgaggagagcctgttcgccttgcatccagtgggccaagcttacatagatcccatctcctctgcataccctcagcatcctgatctataaaatgggagtgaatatagcaccttcagccacaccaccagcctgcctgcggcccctgcctcctgcccggcctcctctgaggtcagtgccttcagctcctgctgcactggtggccaccgcctgcaagtgcttatgtcggcctctgtctctgcaggacgacgtgaacaggctgcggctgtcactgacgtgtcttccttcgtgtttgccgtggggggcatataattgcattcctcatgagggaatgacacagaaagggcagggggtgtcagcaggggccgctctgtaatttccatgtctgggacggatttcaggactgagctgttttcctctttgacccggcagaggctgttgcccaagtcaacagtggtgcgtttttgaatttgtctttgttggttttctttttccctttcttcttctttttaaaataggtctttttttttttttttccatcctatgaaataaaactggagacttggttgtagtgggtaagaattagcagttcctgtccttttggtgtgggagttgggcgggggttgacttaaatatttatttcccattaagggattcatgggcttggacgcttgtgttggaatggggtgatctcaaatctcactcatgattttcgacccctgtaggacttgggcctgcctttgggggacgcggggacgcagggacgcattgagcagaagctgcaagcggatgacccatgggccaagtcaagtctgctgacgtgttttacttggcccacacagtggttttttttttttttttttttcttaaagcttcagtaagttgtctgcctttaaagttgggagcattcccctaaaaagttccggatatccattttctaataataacaacagaagcaaacatttctatgtgacttaccacaggcctggctcagctctagacgactcccatccctttgctcctgggatccccagacagttccgaggtggtgcttcctgtgatcatccccattctacagctaaagaagcagaggcaggcctttaaccgggcactcctggctgtgcccatgttcctgtgtggccaccccttcaggctgggcacggcctctccactcccccagcctcctagcccactgtactcaggttcccccctgctcagagcttgtgggcgtggactttgtaccccccgggcttggagagggcaaggtgactgtgggagtccagctgctgctccttaagttgagttgtctgtcactgacttaccctccctccctctctccctactgtctccattcttctctttcccccttctttctcctgcaccctctttttccattcctcccttcccccttcctttctccgctctctctttccttcactcccttcctcccattcatctggtgcttaccgggggccaccaggtaggcacgtcgcacactacttctgcttcatgtgaggggttcatggtggcttctccctaccttcagaccacacctctggtgggaggtgctgcgtgaggatcccaggggtgaactgagtcaggtcagaggagcagggagccccagcccctggtgtcttcttactgtgtggtctcttccgtgtcaccgcacttctgtggaaggggaatgatgggggaagtggaggaaccactgtccgcctgcggaggggcctcagtgttggccgtgctcatggcgccctcctcctggggctccctctcctctggtcctgcctctcctgcacgcccttcctgcctccttggtgccaggggagccagcccaggacagtctctgtgcctaggccctgccagcctggctgccctgcctccagccatggggggcgggcggggagggagtcgaccagtgcttgtctttgcagaactgctggtggactgaatgtggttctgggggtggccaggcctgagggtaactcattttggaaggtttgggatgtcacttcacttaaggagccttcagcaacatggagtttaagtggccctcttcaccgtggccttgtggcttcatgaatggagctgctgtggtcagcatggctggccctctggagaggagggtgggccatgaggagaagatgctgtgtctggaggccttaaccctttcctcccttctctccctccctccctcctgtctctttctctctctgtctctttctctctaggtgcataaaaaaaattgctttcagataaagttgacatgcaataaactgcatattctccctttgcttttaaaatgatgatctgtttcagccatgcaaagcagggtataaaataatatttcagtgtaaccactcagcggaagaaataaaccattccagttgcaatacctgatgtaccgttctctgatttcaaacccttccttttctctgccccgactttgatgtttattcttgtgcatatttttgtacttgtacaactacatactcttatagaacactccataatgtttcctagattttttttttgttattatatagcttttatttcacaatcataaacttaactcaactctgcaatccagctaggcatggaagggaacaaaacatggaacccaaaggaaactgcagtgagagcacaaagattctaggatactgtgagcaaatggggcagaggggtgctctcctgagctacagaaggaacggtctgatggttaagataaaacacaagttgctgggtgtggtggctcactgccgtaatcccagcactttgggaggttgaggcaggtggatcatgaggtcaggagatcaggaccatcctggctaacacggtgaaatcctgtctctactaaaaatacaaacaaaattagctgggtgtggtggggggcgcctgtagtctcagctacttgggaggctgaggcaggagaatggcatgaacccgggaggcagagcttgcagtgagctgagattgctccactgcgctccagcgtgggtgacagagtgagactccttctcaaaaaaaaaaaaaaaagataaaacataagtcaaactttattcaagttgtccacagttagcaatagtgatcttcttgctggtcttgccattcctggacccaaagtgctccatggcctccacagtcttcacgtcttctttcaccttgccggagaccacgtgcttgcgttcaaccactcagtcttggcagtgcgtgtggaaaactgggaaccgtttgtgttgggtccagcatttgccatggacaagatgccgggacctgtatgctttaggatgaagttctcatcttcaaatttctccccatagatggacttgccaccagtgccattacggcgtgtgaagtcaccaccctgatacataaaccctggaatgttcctgtgaaagcaggaacccttataaccaactcctttctctccagtgctcagagcgtgaaagttttctgctgtctttggaaacttgtttgcaaacagctcgaaggagatgcggcccaagggctcgccgttgacagcgatgtcagagaacacagtggggttgaccatggctgatagaacaggtttcccgacggcgccggtgtctgcagagtggccatgtttcctagattgtaaagtttcatataaatagtatcattacttgggccttcttgtgcaacttgcctttttagtttgcttactttctgtatatgagatccattgtatgaagaagccgtggcatatttatttatgcattctgttgatggtcttctagattgcttctagatttttgctgctgtaaacaatgccacagtgaacatcttcatagataatctccatttacaggaatccaagagtttctcccatttcctgtttcttctccctcccaccccttctttccttttgtccttacttcccgacgtcagccaagttcagcttctcaggctccctaaggatctttaggagacggtgaagatgaatgaaaagaccccagccccagcgtggaggtcagggctcctgggtttcagcctcaacttggtggacctctttgggcttcatctatagtaggaccatttttatctcgtggggctaattcatgccgcgttgagctgagcacctgggcatatggttgatgcttgaaaaatggcagctggttgtgtctatcttctgattttgaagatacacatcgggcttggaaatgtcggccctgaactctttttttttgaaatggaatcttgctgtgttgcccaggctggagtgcagtggtgtggtctcggctcactgcaacctcagcctcctgggttcaagtaatttcctgtcccagcttcctgagtagcggggattacaagcttacaccaccacacccacgcctggctaatttttatatttttagtagagacagggtttcaccatgttggccaggctcgtctcgaactcctggcctcagttgatctgcctgccttggcctcccaaagtgctgggattacaggcgtgagccaccgcacctagcctgaattcttaaggggtagatacagggcagggtatggactgtgcatccaggtcccctcctttcccactgaaggcaatggctgccctccctgtgtgaaggcggctggactgtcgtcatcagcactcagaactccttgctcctgcatgtaagactccgggatcatataatatttaaaaatgcagcagcttaaacacagcagaagcttgtttgttttctctcgtataaaggaaatctagggtctaagtcgtgtgagggttgccgtggctggcctgtggctttgagggcctagggcccctccatgtggctgctcctccgttcttagcaccatgggccaagagaggctcaagttcctgccattttgcctgccttccagttagtgggaaatgggatcttaccatttcgtttgcattccagttagcagaaagtgggagtggcaggggagtggaaaaggacttctgccctgttaaggtgacttctgctttcaccttactggccagaccatcatgtggcatccccggctgcaagagcatctgggaaatgtaagtgggagccatgaatcccaccccacagcaggatttttattattgagaagggagaggaggccagaatagggtgttggcatgggccacgctagccatctctgccactgcccttcccccccaccccagaaagtatcccagggccagtctccacttcactcttgggaaggcgaaggctggtcagggagacacattgcgtgggcattccctcaagcttccggaacaggccatcctttgaaagccactcacatgtagcacagtggaaggaagcaaggcttttacaggggcagagggagtggtaaggtatcagcaagccgtagagtagaacagggagccgacagttctgcatggcgccagcagctcctgggaaggggttgtagggccgagattttggcgtcctgtatggagaggagcagcctgccggagaagatagtgagctccctgagaaagcaggtgtgcaagcaaaggtcagatggacatgtgtcagtcagggaggccaccgagtgcgttctagatccagaaagcacattcatggaattccattgaggaattatggaagggatctcatgcagggatggtgaatgcacagaccatgtgtggtcccctccaccctccagcccttgttggtcctcctggtgccctgcagagccgcagccaccccagagcctcccggtgggaagaagttggcacctgagataaacccatttgcttttcccacttgaattcagttctcttgttcctataggtgtggacgttgagggccagcctggaagcgccatatccagaggcactcagggaggggagcaggagacccagggctctgggattcaggtccctctgtcacaccctgcccttcttctgggtctttcttccccacctcccagccagaaattgcctcctggagccagcccagcctcgtcttgttcattggagctcagttggagacccgtcctcacccgaagcagggtgagaggacagcacctgccacctttaagtctgggctttgctggacgcctaggagaagccgggtcctcaggcactcgagtgggaagtgaaagtgtgcaccagctctttagttctgctattgaccggacagggtttttcctggggggagggggaaggagctgctgtgttttctttgcttaatctggccttgccccacagagaaaacacatgcgtagcctccatcctgtttgtaaagagggcggtcagctactcgaagttgctcgcctggaaaaactgggaagatgtcatctcctatggtaaggaggtgggggctacaggtagctgaggtgggcaatgaatgtcttgagggactgtcagcatgtgacctttttttaaatggtgataaaatacacgtaacataaaatgggccattttaaccagttttaagtgtgcagttcattgagtacgttcacattgttgcacaaccatcacccccatccatctccagaactttctcatcttctcaaactgaaactgtccccattaaatgttaactcctagtccccctcccccagcccctggcagccaccattctctcttcattttctatgactttgactcctttagggaccacatatgaatgggttaatataggatttgtctttttcgtgtctgggttatgattattattattttgctttttttgttgaggtgagatttacataacataaaatcaaccattttaaagtgaagaattcagtgatatttagccactaccacctctgtctagttccaaaacatcgtcaccccagaaggaaatcctgtacccgttaacagtcactcctctttccccctacccccggctcttgaaaaccaacatatgactttaaatttgatttgcatttgcatatattaggccctctacaaatgtatgctgaatgaatgaaagaaaatcctggccagctgagaaataatgatgaaagcttggatttcttgagtgcctactttgtgccaggtccacataagcatgtgtggttctcagccctggccgcacaatgggatcacctggggatcttcgtaacccccaaaacccaggccccaccccagagacgctgatggctttggtctgggggaggtctgggccatagccttttccgagcgattctaacatgagagtgagtggtaggcagtatttccttgggtcatagcagtcctttggggtaggtaatattatctccattttgtggatagggaaacaggttatagaggtcaggtaacttacccaagctctctcagcttcaaatctccatctgaggccaggcgtggtggctcacgcctgtaatcccagcactttgggaggccgaggtgggcagatcacctgaggtcaggagtttgagaccagcctggctagcgtggtgaaaccccatctctactaaaaatataaaaattagccaggcgtggtgacacacacctgtaatcctagctactcaggaggctgaggcatgagaatcgcttgaacccgagaggcagaggctgcagtgagccaagatcgtgccactgcacttcagcctgggcgacagagtgagactgtatcaaaaaataataataaaatctccacctgagtccaaagccctgacccattctgctgctccagcctccctctgttgttttgcaggtgattttggaaggggcacctgttgctacttatgtgtttgctatggggtaaaataattaaaaactatctaattgggatttatggggtgccagctgtatgccaggcactgattcacgttctctcattttacctttacagccaccttgtgcaaggggactgttatgatgacatcagtttccccaacattgttgggaaaggacgggggtggtttgcctcacttatcatggagggagtctccccttggccctcctggtggggacctcagctgaagcagagtgggaaagaagcctgtgtgtgatgtcagggtggggtccaaagttgaggctgaatgcagtgttttcacgggatggctttgacatcggtgagagctgctctgcccagtttgaactagtggtgggccattgaatggagctggagaagctgtgcacacctcagggctttggcccggctgtctccctcagctgcacatggtttgtccctcctatttgcgtttgagatttttgatggctgtgggactcatgatttattcaacaaatattgttgagacctgatagctgggcgccgtctggggctcttaggaatatgcggtgatgagacaggcacagtctccattatcctcatggtctggcaggtggtacggattgttgtgtcaccctcatctgggtgtgccgggccctgtctctgcatgagctccctcattccagcctcatggcaggtgtacaggtgagggccttgagcgactgtgtgtaacagatgaggacagggccgctcaggaaggctgagaagctttcccaacgttacacagcttgtgagaagcggagactgaaattgaatgtgagctgatggcttcagagcttgactaagtaacactgacagataattatgaaagaggaagtccagggagcatctgcgtgggatggggccatgccagggccagagcggctcccagagggtgctgtttcaactgaggtcttggggggatgggtacactagtttcctgtggctgctatgacaaatgaccacaggctttgtggcttaaagcaacacaaagttattatcttacagttctggaggtcagaagtccacagtgagtctcgtaggggctaaagttgaggtgttgtctttctggaagcctaagggaagggtctgttgccttttccattatctagaggctgctcgcattccttccctcgtggcagcatcactccaacctctgcttcagtcttcacatctcctctggctctggccctcccgcctccctcttttttttttttttttgagagggggtctcactctgtcacccaggctggagtgcagtggcgcaatcttggctcactgcaacctctgcctcccgggttcaggtgattcttgtgcctcagcctcctgagtagctgggattataggtgtgcgccaccacacctagctaatttttgtatttttagcagagacagcgtttcaccatgttggccagggtggtttcgaactactgaccgcaagtgatccaccctccttggcctcccaaagtgctgggattataggcatgagctaccgggcctgtccctgccgcctcttataaggaccctgtggttacactgggctcaccagatcattcaggggcaccttccgtctcaagatcctcagcttaagcaactctaagggtccctttgccatgtcaggccacatagtcacaggttgaagggagtaggatgattagggccattattgtgcctatcatagcaggggagagtgaggctggtgggcaggcaatctaaggcctggaggtgagtgggtgcttggctttggaggggtgctgggcgcctaagtacctggaggaggagctcctggaggggagggtgagacagcagagggccttttaagtcatggggcagactgggagttggtcacctgctaagtagcttctggagagaggacctctgttcccacttgagcctggtggacatgcgtgtcccaggaggacggtgtgtgttggggaagcccctgcccctcccccacctaggagcttccctttcacagtgacaggaagagggagagctaggagcataatgtgctttgggcaggaaatgcaggctgcatcttcccattgctggagaaggtgacaaacccgggcttcggagtcactggggctgggtttgaatccaaactccaccacatcctaagctgagcccgttcccaactgtaaaatgggggtgagatagggcctgactcacagggtcagccctggggtcagcgaggcaggtcatgggacgctgttggtgcacaggcatgcctgcttgctcgtccgttcagcagatggcggtggcgcgtccactgtgcaccaggcaccattgcaggcacggagcaaagcaggcatcatcctggcctacttggagcccccattctactggaggagaggaaaatgaacacggaaatatagaatcttgtctgctgccactaagtgctgtggaggaaaccatcagacgagggaggacagaagtattggtatgaatggggagggtgtggcgtctgtgtgtggtggcctttggaatagggtgaccaaagaaaatctggatgagaggtgacacttgagcaggtttggaaaaggtaagggaggaagctgtgcatgtgcaaaggccatggggcagcggctaaaggaggtaaaggagccatccacagcatgtgcaaaggccctggggcagcaatttacctggttttttttctaggaatgcaaggaggtaaatgtggatggagcagaatgtgccttgaggagggtggcaggaggtgagctctgtgagtcactagtggggtcagatggtgtagggccttgtaagaactttggccgttaactctgagggagaggagagagctgtgtctgctctaatacattcaggaaagtggcagctctgaagaccgaagtgcctcctggcttgcctctctccctcccgcagcctcttcctcttcctcttcctcttcctcttcctcttcctctccctctccctgaccctcccccagctgcccactgttttgtggggattgattgggcccattgaggcctgctgcctggagtagcagccttgcccacagtccagtctggggacctttctcggccatcccctcctccagctatcctcagtgttggtcacttatggcttttgctatttatatagcacagtggtttataaactctgcttctagaatttcgcaacccgtcctgcagcatgttatctgtccaggcagatagtggcgatctttatccaaatcaaaggactgaaattaaggggatggaattgtctgcattttatgttttccacccaacatattttgtcataaactgggaacttgtgtaaggtggcatccagtttagttcaatcctgtatgtaatcatttcaagcttaataaattagttaatatttgttaaacacctactgtgtcttggggtttctgcgagatgtgagattcattggcggacaaaccagatagcgtttttgccaagtcaccgagatagtttcaggtccttggccatcatctttttccaccaactccaggtcagctcaggggcccaccaggtggaagtcgcccttccctggcggacctcgcccgttcccattccttctggcaaagtcagatttggtgaaaaggccacagcagctgggtggagttccacttgccagctcgaggaagagttctgggaggcacgggaagccaaaaccgcctgtgaaggaggcctggtgcagctcagaaagccctggctctggccgaggtttgggatgtgtggctgccatggcaacccgtctccccgacgaagggtagacgggttgggcgccgaacgcagggtgttgcaggttgggctccattttgactctggtggagaacgatcacctggctgcaaaaccaacctccccgcccagtacaagcatctcctcttcccccttgggccacgagggtgggggacttgaggcaggagtgggtttttgtagtggggtcattgggtaatcatctccggctctctgctgcagttggtgcgcacagacccggctagtttaaggccattgatgggactcctgtagacgctaagcgatggaaacattgtgcgcatccagtactcggcgtgctctggatggggctggaagatgccaggtgggcttctgaaacgagtgtggggttcactctacctttgatctttgcctgcccgggtgtcctcattcatttaactcttggcttccttattcctctgtccttatccccttcctaggagtggggtctgctcagatataccctcttccctgcctctttccctccctcccctcctgccttcctcctcctacccctgaaaacctctttttttttctgtccaaggctttcttgggcgagtttagagcagcagtttccaacttgagctgcgcattggaattacttgaggagcttaaaaaatgtcctgatgcctgactccacccccagaggttgagattcatttgctgtgtatggggctcagacgtcttattttttattccgacatcatttgcttgaatagctgtggagtattctattgcgtatgtataccagaatgtattaagctactttcctgttgatggacatttaagttgttcctaaattttcctagtataatatgttctccatccatctccttgtgagctcatatctgtcaagaaatactgcgaacgactttgaaatgggtggagaaagattcctgggtgtgttgtctagctcactcatccgagctatttctaccttttgttttctttgagctattttacaactctaattgtggaaagctgataatactgcaagtggttctggttcatgaaaatgcaaaccagctgtgcctgtggactgctggacgtcccagcttgtagacactccccaggtgattctacagtgtggcctgggtggagaattcccattcggaagactggaggtaatttcttaccacagcccttctgatgtccctcccgactcagtgggaactgatggcctatttatttagctgtatgtttacgcagcccgtggaaataacagtaagagctaacattaactgagcacttataatatgccagatccttttttgagaattttaggtgttatttagttatgtgagtacaatttttcatagacagggaacaacctggtgaaataggtagtcttattcccaaatgcagaaggggaagctgaggcgaaagagcttgctggaggtggtattgctaatgaatgatagagctggggtggcaccacgtggcctgcttggaccaccatactgtagaggtgggagtacccagctctcccctggattctgccacttccccgaatgagtcactcaggcgctgtgagtgtgtcatgggaccgatgatcctaagctcccagacctactgcggagggttgaggggttgggcgtgagagcctggcacccggcctgacaggcagagaggggctcccaaaggccacacgcaaggccatcactctgttcttggcgtgttggtttgcacgttcattgcctgctggccagagcgagctggtgtgtcagactcacatgaacgggcttaggggaagaaagggaggcttttccatcacagccaggctttctcagagatattcaggttcccaagaagtggctgtgagatctggagttgatggacttaattcagagacaaacatgcgcactctgtgttcagggccttgcatctgtttcgtccatccactaggcctcagagcagccctgggaggtagatatgatcgcgcccatttgacagatgtggaaaccaaggatcatccatttgttcttgggtttcttttctaattcacctcatacgtcctaggccctgagacgcagtggcaactaggaaattgcacttcgggtcctcgctggagttcattcaggaggggtgcccagggccgggccactttgcacttgagtgcacacagtgactctccaagcagaccgccgagtccctccagtcccgcagagtttccgggtgtcctcagccacaggaggtgaggctggagtgggccggcccattgcccggtccccagagagagccagactccccaggaactaatttcttaagagaccttgaaggctcttaactccctaagcgaatccagctgtgcctggtggccggcactgttgcagatgtcctggccaaagccagcttggtttggaagcccggccccaacagccgccaagtctggaaatgaagtaaatgagtgagttgttcttggccattttcccctcatctcaacccagctcaaatcaaactggagctctgacctcaggcatcgcacattccatactccccggcctcctggggttcaaaggcgcacggcaggcgataaccgcactgggcgttgagcgccgtgagggaagcttctggagggagcgtgggactggggtgggggcagctggcgcagcttcgtttctctggacaccaggcctcggagaaacagaaggggacgcctgctgggctgtgcttggcctctggtcatggggggccctgagaaccagaacaggccctgcaggggtgaggcttctagtgaaccggggggggtgtgggggctactttggggtgccccctccccaccctcccttgcctcctgagcctcactgctctacctgggagccccagcgtgacttcttgagaaatggtggcctctgctaagcaaggctgtcccgggcggtcacggcgagctggcacctggattcctgaggtcctgaggaacccgcttcaaacctgggtggtcagggccgagtggggctctgactgctccactcccgaggccccagaccaaaccacacagcccttgagggtgaatcactttgaagtgaggggttctgagcctgtggcctgccaagcgggccggcttggcgggaatgggcaggctgggcagcatggcccgcgtggcttccaggcagcaactcctctcccaaggcgaaggaagccagagccagagcgcaaggctctgggctttgtggtcagagagcggctgagttcagatatcatttcctagctctgtgacactgggcaagtcacttaaccactctgagcctcagcttgctttatgtgcaaactgtggcttccttgcaccactctcacagggtctgtgtgaggattaaaggaaaaaacccatgcaaagtgtttggttggtgcctggcacggagtaaaggctcaagagctgtggtgccagagagcagcttcagggggcttagcccagcagcatctcagagcaatcccctatcaacaaacaaaaaggatgttccggctctgcaaacacggttactagacgatcttcgaatgcctcttcttgcatggaatgactgctctcggcttctgctctttgcaacctggaggtgccattgggatgccctggcagcctcgcatcttactttaattattattttattttatttttatttattgttgttttattgtttattattgttggcaagacgccgtttgcatagtaaactgagactgctgcatgacttttattttattggctgcatgaccttagcatactaaagatgagtacattgttattattgttatggttctgattagctccgtgaccgtagcacaccgaagctgagagagtgcgaccgtagggggttaagggctcatattccagagccagtctgcatgggttttaaattcctcttcctccacttcctccacttcctagtgggtgaccttgggtcacccgctgagagtccctgtgcctcagtttccctgtctctaaactgggcataatagtgtctacctcactgggttgcagggaggattaaatgagtaatacgtatgaagtgcttagaactgggcccgatgcacggagggagtgtgctgttagccatcattgtagtcatccactcattccacctgcaggttttgattgttggcctcctctgtgtctggttctccccgaaacagtggatatatgcgtctcctgggactgctataagggtgacatgcctgttccttcccccatcccctctctgtgtgccccttctccttggtggcactcctgggcagtcatcagcttccttgctttaccgcagcaccagggaggctcctgtgactttcaggagagccttgggagggcacagaacctctgtactcctcttcgggaactctccccacagctcctggctcttcgctgttctgcaggcccagtgtgatctggaagacggggagagaataatctctggcagagcgatgtagttgccactgtagaatcagatgtgagccactgtcattgatgctggactttgcttcctgtctctggcaggcactggaagagatggcctttcagaccttcctgtgagtttcattcatgcttcattctttcattcattttttttttcattcagtctcttcccattctttctgctttcattcattctattcgttcattcttttgttattcattcatttttcagtttgattgtctgctttgtcctggccatactctcaggcacaggagatgcacccatgaaggcccagctggtccaaggccttggggagctcacatccctagctggtggcatgaggaaaggcgggcaaggaggggtacgatgtgcccatacagatgctgatggtgcactcagaggctgacttgaggggtgagggagggctttctggaggaggtgacttctatgtgcacaggagaggaggagctggagttggtgggtgaagaggggaggtagtgcttgttccccacagagggggactttacttgcagaggctccaggccctgaggaaaggagtaccacaatacactggtacttttttctcctcggtagtcagagcgtattattcaggtacatcacttgggtgcaggggcttgggtgagagaccagcaggagaggtctcctttgtgagtccctctttccaaaagtgccgctgtacccggaggtctggaagactttacaagtgtgtgactttcagagtgcaggaacccagcacaccctgtcaccaaacagacccacgaggccaccattctcccaggacccagctgtgggatggccttggctcctgcttctggttttatggagcccccctcccttctctgtgaaacggcactgcccaggctcgttcagggagggggagagagctgatgtgcgatgtgtgcgtagtgcccagcgaagggcccttcacgctgggagcttttggcaaatgccaactctggcaggaggaggcacaggggaaggagagtctcgggaacttccccagctctccagtgctaggaatttgaccttttctaggggttcagaatccagtgatgtcctgaaatctgcagtttctgctgcagaaagacagttttttatgtgtttccggccaccgggattcttgatatcttctcagtaccagcctttggactggtgctctttgggtccctggggagtgagaggggaagtgagagagggcaagagacctgtggacacgcctgcacgcctgtgccagaggcctgtagtgtcccaaggagcctgacatccctcaggggctgtaagaggttaggtgtagctaaaggttcctgttcctctctgacagagtcatcactaccagttagtagttaattcattggttttctgtgctcctactgtgtgcaaggaatatagcatcacagtgaatgatgtttctgttctcgtggtcaggagagcccagtgcagaggcctgatgctattgtaacaaaccagcatacaaatgcttagcatggatcgggcgtggtggctcatgcctgtaatcccagcactttgagaggccaagttgggcaaattgcttgagctcaggagttcgagaccagcctggccaacatggtgaaagcctgtctccactaaaaatacaaaaattagctgagtgtggcggtgtgtgcctggaatcccagctactcgggcggctgaggcaggagaattgcttgaacccgagaggtggaggttgcagtgagccgggattacgccatcgcactctagcctgggcgacagagggagactgtctcaaaaacgaaaaaccaaatgcctagcatggcgggggaataagggccctgaagaagacaagacccacacagggcaaagggagcaggtgtttgtggcgtggccagtcctctaccaggctaacacttgatgtgaaactttaaggagggtgaaggagggagccaccctggggtgtctgggtagaacattccagacaaggagagcaaatgcacaggccccaaggaggacacggaggcatagggagcacttgagatggggcaggcatcgaactgggtgcagaatacacactttctccttttatctagtgatcctaagagtttcccctgtgtaatgccagtttttctcctggctgtgtggaggctccaaggggtccagcctgcacacagtggaggggtcgagatttgaactggtgactgcttgactgcatagccttggctctcgttgggctgcgcgggctgagctgagagactggggtaggggttttgtggtgggttcctgttcctgacccatgtggggtctggccattacccttgcaggcattatcctcgtgagggctcaggaacggtgtcacccatcacagggcgacagctccagagatgtctagggggctggagtgccggtgtctggggttggccttacaagagcctggtgaggacagggctgggccagcccttgccttttgagtcccgtctctgtcaccgcatggctgtgtgagactctgggcaagtcacaccctttctgagtcctcgttttcttggtaaaaacggggttagtaaaactccctgccctgcttccttacagagcttttgtgaggctcagggaagattatgtgtgggaaagccctctgtgggctccaaagccctggacacgagaattctgattttcctttatttaattgcaaaaacagtatcagtggaacatggaagataatttaaaagaagacgaaaaaaacctcttcatacaattcacccaagtatggaaatcctaccctacccaagtatacaccagctgaatgggtttggatgtattttcagataaattcctcacttggcgaactcttgccgcttgacgtccccaactccacaatcacgtggatctggatcatttggcacccttccctgtctgaactcgggagctggatggatttggctactgaggattgcttgtatcgattttccacttattcctcttggtcttggcccatctgtacacatacttttatgtcattacaggcacagtgaacatgctggtttctttccattttctcctctaccgtcatcagcggagatgacgttttacctagtcttcgccgtgatggaagctttttagtggccacgtggtcatcttttgtgtcacaccatttttcatgaaaccatctccctttggttagatactaaggccgtttcctgcttttcttcctcaatagagtgtgccacagtgaatatctgcgtgcctgtagcgtttttatcctttccttttgatgatgaaagatcatttggaaaaattcccaggagggagattagtcggccacaggggtatgaacattttgatggctttggatatcgatgaggctctcttgctttcccgcagagtggagcccatctgtaatgccatccacagggtgcaagcgtccttattttaacactgccatgtcctctccgggtgtcattgtttttcatttttttcttaaattaacttcacgtgttgaaaatggtgcagtgttcagtgttattagtcaacagctggctttgagacacatgcctgagtgccttcagctcctggctgagtcctctgtccctctgtccgtggccactcagccatgagcacttctgttagcgatgaagatgaaaaagtgtcccttctgcccaggctctcccttcctcctctggctgcagagcagggaggggtttcagtggcatcgcggtggccgggagcgagtgtgctggccggctgggccttgctagcagggccgggccttgctggccaggccaggctatgcaggccctcgagagggcctggggacaaaggcgccttgggaggaggaggcaaaacaggggagggaagggagggccctggagaaaaaggggggaagagaaacaaagacaaaggctggcaaaaatagaccacggaaacggcaggcagccgggataaggaggacaagaggcaggatgtggaagaggaggggaggcggaagttgtcgtggggggtcggggagaaatggggagtaaagggagagtgggttacggggagctgtgtggggtgggggtacgtgggagagagagacccagaaagacagacacacagagagaagggagcggccgaagaggagggcccgtgagcgagaagatgcagatgcccctttagtaggagggcattgctccctgcgcccctggaagggactctgggctggaaaggaccagaatgcagggaggagccgctggcgggggtcactggaagcttgattcgggggaagctgtaggttggagctgggagacccgagttcctgcccctccagggtcttgtacgtcctcacagaggacctagggccttgatcctggtcccggcacacagacacttcaggggtgatggagccaccacaccgaattctcctctagggccctcccccagcatcagagtgcagtctgagggcagcagtgggagctggactggggccatctgtgcaaggggttattgtgcccaggtgcacaggccggagctctggggtcactcaccctccgcgttacctgtcgttacctgtcgttacctgtcgttacctgttgtctggaccataaaatgcagatgggaatgtcgcccacttcctcaagtctttgtgaggattaaacgaagtacgaaatataaagcacttggagtggggcacatagtgtgtaccgtgtgactcaaggggctgtcctctttatggtgacgatgacaagggcatcaggacagcagccagcatggcgcaagccacccgggcccagccttgttgaatcttccggcagtgtggcgagttaggtctgctcgttcccactctccgcatgggaaaactgagcttcacagttaatataaacaccaacagtaataacaatggcagcaacaaactgccgaatatgagggcctaacatacacgaagcaacacgcacgtcgcagaacccacagctgaggagaccagagctcaaaggggcgagtcacctgctggctcacacagcagccgggaccgggattgcaggtgacccacgtggcttcagggcccaggcctgccctgtgactcacgcggcctgtcacccgccgtttcatgtttcaggcctcgcctgtacactggtgcttctcaggaagtcttagggaagatgacttatttattagccgtttttttaaaatctcttaattaaaaaaacaaccagtgtgagtatgtggaaatgtgattcaccatgtgatcggggaggtcagagccagagtccctggctcaaaggtaacacccctgtccacctggatgaagaatgttccagaagcttccctccaggcacggtccttgcctgctgagcagtcaccgggggaatcgggggcagttaccggggcctcagactgtgggagctgcctcttcctgggtctccagccgtgatttcagactcgtctttcatccttcccctctcggttgccagcccagtgctggagggacgcagggcagagcccagccagctgcaggtgtttccaggcatgtgctgggaatggagcagatgcggggctgaagctttccccagaactggcctttattgacgcagagggtgggaaagaaggcacgtggctgtgctgggagagggtgggtctccctatagcctggacctgggaagggccttctctagagctctccagggacggccagacagctccccttccaccttggggtgtaagcggaacaggacacactcccctcaggaagcacggtatcaaagagggtcaggaggagccccagccggctcccgttctgaggaggcacctgtgggcatgggggacccccggggccgccccccgatgcctccgctgatgcttaaggtcacacagcaggacatggtagctgggttcaaactcaggtcaggccaactgcaaagcctgtgctctttcgactcctggatggacactgcccaggtgcccctgggtaactgatacccttgtccccaaacaactctgaatctcttttcatcatgaatattattaataacaataaatactaataactgccatttatcaagagcccctacttgccaggtgctttctcattcagcctgccaaggaagcccgtgagttgggcaccagtatcgcactttacagatgaagtcattgaggtacagagcagctatgtaactagccatggatcatagagctagtgtcggagatggcacccacacacaattctgatgacaaaaccttacacttggggactgtaaggctttgggcacattaggtgacctctctgagcttcagttttgtcttctgtaaaatggacctcatatgctgtccgtggcataggtttgcatatgtgaattaatgactgtggagtacctggcactcagtgttagctctcaccatcatcatcatcattactgtagcatagggtttctcagtgaaacagacactgatggtcagagtggacctctcagcctgggggaagcagaggatgaaccctctggggcggggccctgggcaggctggttcagtgataagcaggagccaggcgacccacaggcttcttggatgggctgggcgtgcatggcataaccgtttgagaacaacaaaccaagccggccgggctgccgctctgtttcctgcgaggagggaagttacagatctccgccctggcgtccggggaaggatgggacaggctgctgaggtacagtcccatgtggggaacgactctgtccagcttgatgtctgtgcctaaaacctcgcctgctgctgctggccacaggccagtgaaattcacagacccacttctcagagggtgggcaggtgtgtctgctaatctgagagaccccaggccccttctctttttatgtttgtgggaggaatggctgagaccccaaagctgtgggctgctgctctttggaggacttgagacattgtgagagctgtcacctcctcctggaagcccctgcctgctgtggtcagccatggccactcactctcctggggcatctgctggcctcccttagtgacttggctgttggctgtcattttctttccacctcattcccccaactagacaggaagctgtcagtcctcagcctccttatctgtaaaatgcagtttgcgagataatccccagctcccccagctcccccagctccgagacttgcaggagcagagaaagaggccatgaagctggcaggggcgcaaaggaagcagggcgttgttccagggaagggagagcaagtgagccagggaccgagggtggggctttgaagatgctgtgaatccagggtagcaagtgtagtggtgcctttgttttttcatctgtagaatggggataatgggactggtctccaagggtggatatgagtgctgggtgagttaacacacatcacatgtgtaaacagggcctggaccatagtaggtgctatggttactattaaaattgctacatttagttaattaaaataaatattaaatcaatatttgtcgtgcctgttgtgtgctcagaatacagcagtgaacaaaacagacccccttcatgggggcgatcctacttgggggcgatggatgggaaacaaggaagtaagtgaaacctatttagaatttgtacgatggaggggagttaattgcttctcaaccctgacaagtgaaaagaaaagtgagaaggactttgaaggacaaagaccaattaaaatttcagcctttcagcaaggatcaaatcagatttatggttgtttcatccagtgataaaaccctttgaatggatgacgatgtctcaaagtagcaaagtggggtgcgggagagctcagttttaaatttggtgagcttttgtgcacgtgcttccagggatttggtatcacagctgtctcctccaacagcaagaagagaaggttcataaaggcacaccatcccagtagaggcgggggtcagccccctgcggaccctggacccctgggaacacagtttgaaacctggtgctccatctcttgggcttcttcccaattaaaatgagcagagtcttacattctgtgaaactgaatgggagccaaggggtcaaaggacaagttcaagagggagaagccagtgccgcttggcgggcagtgcccgggacacccacccacagcctggcagctgggccatttgcttactgctggctggctggggggttcaacagttggaagaggccataaaagtggattgcacagatgccctgatgctgggcctcgtaaggggtgtccgggctgtggggatgtctaggcggagagggaggtgtagaccctgggcctcccaggcacagtgatggggcagctggagctggtggtgcccatgcaacagtccaccctcctccaacccctgcctgacagccttgcatagcccgggggactcagtagcttggggctcccctctgctcaggcagacctagggctctgatggctcccatttatgagaacagctgtcacttggaaggacctgctacctgtcctccgagatgtgtttttcataccttgtattggtcctctccaccaataacccctcatggatgagtgattgttactgtgtaggaagaacttggggctcagtgaggttgagccacttttccaagaggccacttagagctggagctcataataagtaggggtctctaggaactgtttctaaacaacccccgaacccagctggtggctcccagaagggtctctggaagcaaggcgactgtctcattgtttcattagtttgagccctacggggccttaggacacagccagcttggagaagtcactctaataacccatcttgccggtgatgcccaggcctcggcagactggctctccgagggtgtctgggcctgggcagccgaggtcttgttaaccccaaatcccacaggactcgcatagagtgcagaatcccggttttctgaattggtgctaaaggctcagtggcctggccctgctgtgaagccacagggcttgtgctctgggagccttggccgacacaggtgccccgccgcctcctctgctgctgcagcctcaagggctacaaagaaagctccttctgcccgtgcagcgtgggctcctgggtcccctgcaggccaccatggctgctgctccagctgtggtccccccagaggcttctccaggcagtgcctgccgactctccggtgcttcccttattttattcctcttccgggcactaagtttcggtttccttttcattgttctttgttggtctgttcattcattcatgcatgcatgtgttggttcattcattcattctcagagtaccatggtggctctgaggacagaggtcagacccagctgggttggaacctgctgctccctagcagtgggcctctgggcagatgttttaaccatagaactcggcttccttgtctgaaaacgtggctccttctaggacagtcaagaaggttcaatgaaatgatggatgtggagccccaggacgtgacctgaggatggtgcttgtcatgttggggtctgtgtccctcccttgggcacattctctccttccttcctttccagcttcctgaggacggtccagtgccgggggctgggcacaggcctgagtgagatgcggcccttgtcccccggcctttttggtctgggtcctcacctctgcaccgagtccccctggggctgctcggcagctctgagggggccactctgcctctgcccagtggtcctgctttctcacgggggttatcaggcctctgctcctcgcgcctcactctgagagggtccttccacctgactcatggctcccatccctccatgcccctgcccaggtgcccacacatgtgtgccccagaacatggctgcacacacttgcataccccacgagcacacacgtgtgtgcatgcatacaccccatggtccttgagcacacatgtcctgggccctggcatgcactcccccaggcgtcatgtatacacacagtccacacgtttgcaaacgggcagacacacctccctcttgcacatccgtgcacacccagcccatatcttcctgcccctgcgtgtgcacacagtcccagttagtttacaccgtgcacacctctccatacatacaggttcccagctgtgcgaccactcacccacacgtatgcatttattttttaacacacacatgcataccatttagtaggaccccatgtacaagcatctgagtgctttacaaattcaaatgtatttaatccccctatcaacactaggaggtagtttctgttattagcgccattttacaaatgaggaaactgaggtgtagagcagttagatcggtgtagagaagctagatcgtgtgctcaaggcttcagtccaggctcttggccctgacacgatgctgtttgcctgttgaagatgtgtgtgcatgcatgcaccattcacactgtgaacgtgtcccagcatggccacaccccctcaccgtatacacatatggccatgagcactcaatctcaaggtcatggatgcacatgcctcacacctatgcatggaaggacactcggcacacatacttgtctctgcacacacacaccacttgcacacccatgtacacatgtgccccaagcctcgccccaatctccagctccctttcagagtcccttctaggatattctctgatttctcccaagtgcccagttcgggagggaagtgactgcacagatctggacctggcgatgacctctgagtgggaggcagccctggctgagctgtctcctcaccttagcatccgcctgtcccggcgcccatgtagcttccttgtcatccatcttctgggctggcccaggacacgtgcccccatcccagcctccaagaatctgggaatgtccttagcagactgggctggcatgtggcctctgcccggggagcagaggtggctccccaaaggcttcctgagaagtggtggaggagactcagcttccccgtccagtcctttacccctcctttacccagcagcgccctctgaatctgaaacagttttgggggcggcagctccggtcctgcccagcaactcgcagttgttgcctgtggcattcagattcaagtctgggcttgtcagcccgggcgagactctcctattttggccctatgggaggcatccaaactcctctgcccttgccttccggggcgccccacgcactctgggcttcacctggctcctctgctttgcttgggctgctgacttctggaggagccctttcttccttctctctcctgatgcagaacatacccagtctccctggggcaatcggccttcttcagccactccttggtctctgctcctctttccctccctcactctgtgtcctgccagccccagcctctggcgacttttagagctggtgcgcagtcctgcctgagcatcggtgaacatgacgccatgggctgtggcttaacgattcttttggtgaattttgattctttatcaaaatttccttccttccttccgtccttccttccttccgtccttccttccttccttccttccttccttcctgcctccctccctccctgcctccctctgtccctccctccctccctctctcctttcctcccttcctctctcctttcctcccttcctccttctctctctccttctctccctcctccctcccctccctccctctctctctctcccttcctccctccctccctccttctttcctcccccttttctttctttctttcttttttttttttgagatggagtctcactctgtcgccaggctggagtgcagtggtgcgatctccgctcactgcaacctctgcctcccgggttgaagtgattctcctgcctcagcctcctgagtagctgggactacaggcgcgtgccaccacatccagctaatttttgtatttttagtagagactgggtttcaccatattggccaggctgatcttgaactcctgacctcaaatgatccacccaccttggcctcccaaagtgttggcattacaggcatgagccactgtgccctccccggcccactgtttcctttccctccctctctgtccttcccttcctccctcccttccttctttctttccttccttctttgcatgtgccaagccaagccttgtgcatctgcgtctttgaagtcctcacgagttgaactaacaagagaagaaaaacccaggatatgagaaatcattggattgcgcaggtgccctctgccaattggttagcaagtttttacgagcaaatctggtggttatcctttggaaaataagcaaaggcaaaccacttcctgccacttccaggagctgctcaagtgccggagctttctaagacctactgagaatctgaaacttcaggccagcgtcctccgttttcctggagaacgcagtaatttgtgttggtgaaattccactgggcctgatggggttggagattgcatttcagtcttgtcttgctaaggaatttctgagatcgagtaatttggcaagaagagaaaaggagaacaactttgggttgtgacgcacgggcagcaaatgcccgtcctattttgggactggtgcctcctgctttgcgtgtgccacacagcctcaggggacctgaagcccctctttggccccagggggagctctggcagtgccctgtgccacgcattgtatcgggctccttgcactccttcttacttgacttataaggttacgctattaaatagcgtcatctgcagaacagccctaaattcttgaatggggagagaaaatgcggtagctgggggtggagtggggtcgggggcaggatctcaggatgggtgtggcatgggcattgatgcttaggtttgactctggttctttttttttttttttttttctgagacggtgtctcgctctgtcgcccaggctggagtgcagtgtcgtgatctcagctcactgcaacttctgcttcccaggttctcgcaattctcctgcctcagcctcccgagtagctggaattacaggtgcatgccaccatacccagctaatttttgtatttttagtagagtcgggatttcaccctgttggccaagctggtctcgaactcctgacctcaagtgatccgcccacctcggcctcccaaagtgctggggttacaggcgtgagccattctgctactaaccggcaagtgacttaagtccttgtgccttccttgcctgatttatgaaatggcaacaatcctggggatgatgggaggacttttttattcagtcaacacatgagtggtgcctactatatgctaggccctattctaagtgttgcaactattaaatagagtagtctgcagagcagccctaaggggcagctactgcctagctccgatgaggaaactgaggcccagagaggttaagtaacgtacccagctgctaggaggcagggctgggcttcagaccatggagtctggacccgggacctgggctgacagttgcagcataacaaggattaggtgagatgctacatcagtgaggtgaccacttgtcctgttttgcctggacagtcccagtttacacttgtagtcctagtaaagtgatcagtgacgcttcatttcattcatagattacatggtcaacttatgtattgagtattcaggacaatcctggggacatggtggcactgcctccatgtgagcaatggagggggaggtgacatggccacagagcacccagcctggctcgcctgggggtgcctgggttacccgcagaacggagatgtcctcgttcattaactcattcgctcagcgatccatgggcctgtcacgtgcgccaggcatttgggcgtcatgctgatggctgggcgaggatggggaggactcagacaaaagaagacagccagcaggctctgggaaatgaagtcacatccaagacctgcccttgtgagaaatgtcaagtgttaccgttatcatcatattcccattgctttgtttggcaaattatgacaatatggctgttaactaagcagattctgattacctattgtttgaatgcaaaaaacaaaacaaaaaaagaagcaagaaaaagccttctggctatgtgaccagtatttagaaatttccattcctgaacaggcctcagggcagagccagtccccaggctgtgcggagccactgctgtccctgcaatgccgggtaatcactttgtctttgctgctgcatccatcacgccctgtctctctgtccttagatatgtttgcgtgatgtcgtgggatgtggctttcccaggcagtctgttaagcagccagagatctactctggcctcctcgttgatgtttcattaaagagctgccctagttcagcacaacctaaatattacagctaaagaacacaggccccggagtacggtgaccagtttgttctgatttgcccaatactgtcccaattatactgaaagtcttgaattccaggagatccctcagtcccagggaaaccgggatacatggttaccctgctctggagtgaacacagccctgggtcatcatctgtggctctgctgtgtgacagccgggtgcttgatggtgaagagtttccccctggtatgagcagtcagtgttatccctggtctcagtggatcactgggtcgcctgcctagtcccagatacctctgatccctttattttaatttttattttttgaggcagggtctctgtgcacccaggctggagtgcagtggcaacaattatggcttactgcagccttgaccccccaggctcaagccatcctcccacctcagcctcccgagtaggtgggaccatagatacatgccactgcacctggctaatttttaaatttttttgtacagacaggtctctctgtgttgctgaggttgttcttgaactcttgagctcaagcgatcctcctgccctggcctcccaaggtgctgggattataggcctgagccaccgcgcctggccttctgccccattgaggtgccagtctggtcaccttatctcactgtggatgtctagaagtgaattctgaatctcaacccactgccttgttctgaggttgcctgaaccccatggcacccctccagatccctgagcggatcaccaggcctgtcagtgacagacgtcatcacctgggaacagggcaggatgtggctgagtagctgacatgtaatgagggcgtgttcacacctggccctgtgctccatggactttatatttaaatcctcacatgccaactgtcattttataaatggagaggtgaggcttgggaaggttcagttatttcaccagtgttagaaaaaggtcagtggggttgggcgccgtggcttacacctgtaattccagcacttgggaaggccgagggaggcagatcacttggggtcagaagtttgagaccagcctggcccacatggtgaaaccccctctctactaaaaatacaaaaattagcctggcgtggtcgtgggcgccagtaatcccaagtacttgggaggctgaggcaggagaatcgcttgaacccgggaggcagaggttgcagtgggctgagatcatgccactgcacttcagccttggtgatagagtgagactgtctcaaaaaaaggaaaaaagaaaatagaaaatggccagcggggctgggcaccatggctcatgcctgtaatcttagcactttgggaggccaaggcaggtggatcacttgaggtcaaaagtttgagactaccctggccaacatggtgaaactctgtctctactaaaaatacaaaaattagccgggtgtagtagtgggtgccagtaatcccagctactcgggaggctgaggcaggagaatcgcttgaacccaggagatggaggttgcagtgagccaggattgtgccatcgcactccagcctcggcgacagagtgagactcgtctcaaaaaaaaaaaaaaaaaaaaaaaaagaaaagaaaagaaaaaatggccggtgggcctgcagcccacctgtgctgtgtgtgctccacggtctgtgccattccacgagtggtcccagtctgtgcctatctgcagagcttgttaccagcctctagggagagaaatgaggagagcaagagtgagggtgtggaacccttttagcattttgacattccaatgaaattttcattatagttttcaaaaatattggtttacagtggattggaaagaaaataaaaatgggtcttttcccacagacagtttggaaagtgctgctttagaccctgctcttttgaccccttgaatcagccagtgaggctgggctgtgcaacggtaacgggcagcgcagctgctcaacacacctgaggtttatttctccttcatgctaaatgtccagggcacatcagtcgggagccttgctcatctgatcgtgcagtgacccagccgatggagggcccgtctcaacatgtgcttctgctgtcctggaggcaggacgggggtgtggccacttgtacaggacacacatcactgctcatggttcattggccagcacaagtcacgtagccacacctataatttataggggtgggtgaagagggaagggaagtggaatccctcatgtgttctgaaaaaggagagaactgggcctgtgtggaggccatgttgttgtttcgcttctgcctgttcttgcttccatgtgggcctggtcctccagaccccacgcctggagagctgctgatcttgtgcgttttgtccatttgcaccctggttttcaaaggcagcggggtctgtgagccccagagcctcagctgggacctgctgggccgagtttctggtccctcttggagctttagtgctttcttagtttgggaactgaaagccttgtctgtttccccagactgtgaagaaagttatgagtagtgtcagggagctctgcacagaaactttggccaagatcatttccctcttgtaagctgggtctctctttgagtctctcctcagtgaaagagtggctggtttaaatcaggaacaggctgggcacggtggctcatgcctgtaatcccagcactttgggaggccaaggcaggtggatcacctgaggtcaggagtttgagaccagcctgaccaacatggcaaaaccctgtctctactaaatacaaaacaaaaaatcagccgggcgtggtggcacatgcctgtaatcccagctattcgggaggctgaggcaggagaatcacttgaacccgggaggtggaggttgcggtgagcctagattgtgccattgcactccagcctgggcgacaagagcaaaactccatctcaaaataaaataaaataaatcaggaacagtaagaactgccgttcattgagtgcttattacatgctgtcacattgctgagcagtttacacacgttgtctctattcatcctcctgcaaccctaacaggtgggacccctcttagcctcattttattgatgaggaaaccaaggctcggagaggttaaggaacttcctgcagctcacgtagttagaaactggcgaagctgattggatctaggcctgtgtgatcctgagcctacactcaggaccgttctgatcctgaccagtacttactgatttggggtctgagaagacagtaatgagcaagggcccccagagaagttttctgaccttcacaaagccctgctgagatcttgacctctgttcttaagaggtggatcttgcctcagttatgctcagccatttcattacacaggaagacctcattcttccttacattgcaatttattgttttttaaagaaactggccttgtattgtggaaataacattggaaaatggagattaaaatgggtaatggaaataacaatcagtaatggcttaagaacagaagcttgattggggaaaagtcttccgaatagaaagatgatcaagtgggaagaaaataaagtggaactttgagtttgaaatggctcactcatgcctgtaatcccagcactctgggaggccaaggcgggcggatcacgaggtcaggagttcgagaccagcctggccacactagtgaaaccccgtctctactaaaaattagctgtgtgtggtggtgtgcgcctatagccccagctatttgggaggctgaggcaggagaatcacttgaacccaggaggcggaggtggcagtgagctgagatcacgccactccactccagcctggatgacagagcgagactccgtctcaaaaaaaaaaaaaaaaagaaatggctcaaagccttgttcctgaatgtcctctaaagaaagatcatcggccgggcacagtggctcacgcctgtaatcctaacactttgggaggccgaggtaggtggatcacgaggtcaggagatcgagaccatcctggctaacatggtgaaacctcatctgtactaaaaaaaatacaaaaaaattagctgggcgtggtggcgggcgcctgtagtcccagctactcaggaggctgaggcaggagaatggcgtgaacccaggaggcggagcttgcagtgagccgattgtgccactgcactccagcctgggtgacagagctagactctgtcttaaaaaagaaaggaagatcatctgcccagccttggctttctgggggtcttgggtaccctccctctgcagctgctaaagataagcctaaaactacgtttctcaaactgggatatgtgcagcctgtgagggtgtcaggagtttgagaaaccataggctaaattgggtgtgtcctctatgtgtgtccacttgacttgtggattcagagggaaaagattaagtaatttaactaatatataatttagaacatggctcatcttcttggaatgagcattttccttgaggggtggaaaggttaagtcgtttaattggtgcgtaatgtaaaacatggctcccctttgtgggaacatccactttagacaatttggtgaagggagaaaaggtgaaaccatttaattcaggagtcattggagatattattttgctgttaaagtgtgcacagatgtggagtggaatgcaaattcacaaggctcattaagattaaccaggagacctgagtggaatctcctggttggggtggccgcagatcactttgcgtttgccctgctttatatttggggttcttgggggaacaagaggactgggttctggggaagggctgtgagggtagcactcagtagtactggggtgtgagtcccattgctgcctgggacactggcccagcctgctggagctggactgatccggtgatttttgcctttcttggtttatttcccatttggttttcccaggcttttagtagagcccacttgggcaatgccaacctatccacccatgcttaacggaggaatcagagatgattgaacagagaggaacaaagcaggagcattcctcccccaaccttgttctagagacaaagtgagtgctacatcctctactttatattattttgaaatattaaatgtgtgcatttatttttgaatagataggactttcatatgatgcacagctcaggaaatctataaggaaatgtggtgaaaagtccctcttgccctgtggcccggctggcttatctcctccccagaggccacagcatccctggtttctgatcatctcctttgtggacataattaggtacatagacgcaaatacgtacaaatttggtttgtttaaacgaatgatagaatcctgtgcacattttcctgtaatattttctcactaaacaatagtgaggaatggttgcatatcaggacagcttccctgttctctttttgtggttacagagcattctactccatagctctatttggtcattttcttactgatggctgtttttgcagccttttactctttcaagcaatgccatgtgattatccatgtatatatatctttgagacaaatgcaaaaatgtctctgggaaaaattcctagaaatgaaatgtctgagtcaaaggttatgcacctctggaatattgataggtatttacagactgcattgggagtttcagcactctccatcagtctgagagggtgctccgtgagacagatctcaggacagctcctgcaggcctgggatggtgtgcagaatgatctgatcatgcctgagggacccacgtaggccccaggatggggatcctcatggtgtctcagggccccttctgatgtatgcttttgtcaactgtgcactggggttgggaagtacttaggagagcaagtgtcatgtctggagtggttctcccttggccttgcctgccattcctttgctcagcgtggagtctcccctactccaggaatgaactcttgaatacaattcaggttccctttcccttagccttaagagcagcagcttttatgatgggaagggaatcattcattttatttttttcaaataaagatctactcttcagagagaaaaagtgccagcaggtcctcatgaagaacagattcattcaggtgtctgcaggtgtcaccaacaccgtgtgctccccgtgtggcagacctcctgtgtcctcagctgtcattgccccacagggctctctttagctccatcctatagatgcgcaagcaggtgcagagagatgtggcatgggcaggaccacccagctggagagcccaccggaatgatgctgatgtgccctcagcctgcacagttccctgcctgtgtgtgtgtctgggggcttgcttcctgtcacctagctcggcataacacattggtgggagtttggctttggagataggcacttgggtttgacattggggctgcctccttcctgcgtgcactgcctctggcacctctctgagcttctggttttttagctctaaaaatgggaatgactttcatgttggtgcctgatgtgcaggtactcgggggtcatagtctggctgtctttcccttccgcccactctgtccgcctccctctggtcatcctgagcaggtcgagccagggcggccctaagcagagccctaccctagggttggggtcagggctccaaccctggtttcaggaatgctgcctggataacccaagggcatggtctgaacagatgtctcttgaggcctacctgccccagctgcacatccttggggctgggtcttaactgggacccagacccctcagcttgctgtcttcctgtctcccttaaccagggaggagagaacaggtgagtttcctggtgggcaggagcatggaagtgtgatggatctgatgcagtgattggctgggggcccctttgtcaggagctccggacatcctgccctcacggagaagtcctgccccaaaggaagtatgcctgaatcagacctggctggcaaattgaacctcattttctgatcaatttccatcaggattttagatgaggatgcttttcctgtatctttaatggggcgtttggcaaaagctctgctcactttggctgtgactttgtctcttgggcctctatcaaggtattgacgacagtgacgtcagcatcctgctgcggggctgccaccctctttgtgttatagttctcaaggtctgatcggggacgagggggtgctcgctcctcacagctgcccaggagctccacggagcaggtgtcagggcccttgtttccctgggtgtgagtcgcccaagtgggaccatgatggccgccctcatcacttcatcactgatgtttttgctaataataatgatgacaatgtcaataatggtagtgttattaccacctaacattattatgtgctctcagctaagcacttggtttggattagtttaatcctttgacagtcttctgaggaaacactattgttagtagccctgtttaggaggtgagtaaactgaggtttagcaagcaaagggacatgcacaaagtcacacaaccagccaggcacaaagccaggatttaagtcctggaggtgcgattccaggtcttttcaaaattacacttcactaccacctttctcagatactgtgatggaccagtccaagaccaatgtttttttttccttcattaaaacaaaaaaaatcacaaatcacaaacctttattttgttttgttttgtttttttggtgagatagagtcttgttctgtcgcccaggctggagtgcagtggtgagatctcagctcactgcaacctccacctcccaggttcaagcaattctcctgccttagcctcctgagtagctgggactacaggtgcatgccaccttgcccacctaacttttatatttttagtagagatggggtttcaccatattggtcagtctggtcttgaactcctgacctcaggtgatccacctgattcggcctcccatagtgctgggattacaggcttgggccacagctgccagcctaactttgggaaattttaaaacatatactgagagcatgggggagtaaaatgaacccccatgtactcatcatctgcttcaacagttcccagcttatgatgagtcttggggtgtagctgcctctgtatgcttccctctctcccagccactgtttagatgcaaatccctgacatgctgttagttcatcagaaatgacttaaataggaatctctaaaaaataaagtatcttttaacaaatagatataaatgtaataccatcctcatgcctaagaaactaacaataattccttgatatcaaatgtccaatgttcacatttccctagttatttcattcatgatttttactattggtttgctcatttaagattccggacgtggtctacaccctgtatttgcttactgaaggttttacaatctctttaagttagtcatctgccctgtagaattttccatattctgagttttgctgattgcttcctcatggtgtcatttaacacattcctctgttccctgtatttcctgtagatttcctgcataccttgtgaattcctagtttgtttttacacaaggtctcactctgttgctcaggctggagtacagttgcatgatcgtggctcactgcagcttcaacttcccaggctcagatgatcctcccacctcagccttcctggtagctgggactacaggtgtgcaccaccacgcctgcctaattttttgtatgttttgtagagatggcgtttcaccatgttgcccaggctggtctcgaactcctgggctcaagtgatctgcccacctctacctctcaaagtgctaggattacacgtgtgagccactgcacctggcctctagttagttttagacctgtgctgtccaataccacggccaccagccacacatggtcgctgagcacttgaaatgaggtcctcattgagatgtgctctaagtgtaaaacgcacactggattttgaagacttagtatgaaaaaaaatatacagtatctcactactcattttttgtattgattatatgttgaagtgataatatatttgatatattgggttaaaatatattattaacattgatttcacctgttttacttttttaaaatgtggctactagaatatttagttttaaacatgtggcttgcattgtatttctattggagagcactgatctagagatttggttgatttggattaaaattttcggcatgattcctctctaggtaggtgtttctgtgcacttccagttgcctcactccagggtccctcatgccttggtgggggtctttcttgctgtggttgatgggcaggttctggtgctggctgcctgatctatccatcaccacccccatcacctttcctgctcatgttccagtgggcaccagcaatcactgctcaggtgcattatttcattagagattgcaaagggcaggtgttttagctctacctttccttcctcatttgtcagatgggatcatccgaagaagggcttcacttcatcagctacatggttgttgcaatgtttagtgtgtacaggaaaggcagcagaaatgcttcactcttcccctttgtatcaagtttagagtaataaactgattttgtagcatcttccaaaggtttttttttaaatatcaacatgaattcatggatttaaatttatatttgatgaatttcttttttattaataaaattaattggccacaaaataattataattaaaataataattttttttgagacagagtcttactctgtcacccaggctggagtgcagtggcatgatctcagctcactgcaacctctgcttcctgggttcaagcaattctcctgcctcagcctcccaagtagctgggattacaggcacgcaccaccacacccagctaatttttgcatttttagtagaaatggggtttctccatgttgcccaagctggtctcaaactcttggtctcaagcaatccgccctcctcagcgtcccaaagtgctgggattacaggcgtgagccaccatgtccggcttatttgatgaatttcaattccttgcagttactattcttttggatgctccggttggcccatttttggctggtgggagcttttgagttttgattttgatcccttgccctctggtaaacctctgagttctttcctcttcttggtaggttggaagattctccccctagatcgagttttcgtagagcggggcctgcctgcatccgttgctgctcaccagacccagagtgtggggcttcctgccagcaggctattcagaggagccgcctttctcttgggcctggttgccaaggtcccagcaagaggctggagttgaggagacagccagcgcggctggcctgggccccacgcatagtaggtgttccggaaacggctgttgagtgaatgacaggactgcaagctgatctgccataccacctggctggagtgggctcctttccaccccgggattctccaggaggccagtttgcaaatagagctggcctttgtttctctgccgtgtcggggacaccttcctggggctgagccggcgtggagctgggattgtacctccagcttgtgctgagggtgctgacttgggaaccccccggtccgttctggcctggctgctgtgcagacccgtgggtctaggcaatggggcaagggtcagatgggtcaattcccagagtggagctgcctcctgtttccaggccaagccgttttgcaagggacacaggcatggccctagctggctccagacttagtgccattacttcctggtgtgaatatttaagattccagctctcggatcctctgggctggctttcattccactgacttgcaacctttgccctgttgtctttgcccaaaccatatttgctgcgcttccctcagcctaggtggggcattcttgcccccactgcccagtgcaatcctggggctagaggaaggctttgtgttttgaccccaaaacagaccatggggtttccgttgtggttgctgctgctagtttaaaagaaaaacaacaaaaacaaaacaaaacaaaaacgccgccagctttgttgatgtccagtgaatcttcatccctaaaataatgcatttgtttatggagactgacttcatgtatttactatagaagagactagaatccggtgacacttccagtctatttgaggaatggatttgcatctggttttgtggtgaagagggtaggtgtcccagcccatgcagttggaggggtggggcaggcagggaggaggagggtggctgagaaagcttcccctttgtgggggcgtgtggccacctccagaggatcagggtgagggaagcttccagaagtggcatgaggagggaggaagaggcagcccagtttgaccttaggaacgaggctaacttggggtgcagtggtcaggagtgtgacgagaccatccaggttccaacccagctggctactcattagtccatgaccttagacaagtggtttgcgctcactgagcctccattcttcatctgcaaaatgggtgtactgtgagaattagatgggacagcctattaattaagactttagcgtggctctcagcaccgcatgggcacccctggtagatctagtgttgcggtcaatcgcggtggctctggagcctgagagcccaggagaaggtcatggcttcaccccttataacctgggtccccgtgggtttgtttccagacttctctgtgcctcagtctccttatctgtaaagtggaggaaacagtatttcctgcttcccagggtggttgtgaagattaagtgacttaatacacaatccttaggctgctgcctggcctgtgtgtgtgccgtgccagtgtgcgccatggtggctctagctgttgctcatactaacatctttcagaggagctaccacagaccaagtggggcgctggggtccagtaacagaaaatgcgatgaacactcccctgagcatcgttgttcgagggcctgctgtgtgccaggcccaacagccctggaggaaggtcatatccttcccattttccagagctggagactgaggccaggaggtgacccatggccacgtggcctgtcctggcaggagtgccctgtcccaaagctctcagccttttccctgtgccagaccgtcttctcccagttaaactagaagcatgactccagcagagagaaacctactgggggctgtgctttattctgggctctagggctgaaggattgaccgggcaggtgaggctgaaccctctcacctgtcagcgaggcctcaaaatgactcacagctgaaaggaacaccttggccttctgattctcatccttgaagcgttgtggtccctcacgcttctagatggaaaaacacaaggtctgtgttggagggcactgacgtgtgtggcgatgtaaggagaggcacagctgatcttggctttgaaggctgggtgggcgggcaccactgggcttctgtttcagagaacgcactattgatttactattgagtgctttgggagcacagggccagggctggggataatgggaggcgtgtttcgtcagcccaagagcatcgttaagtggccatcaggaaatcacagggctggaggggctctcaaatgaagcatcaccggctttattcttttagcaaatgtgtatcctgcaccaggcgctattctaaggaccggaggttggtagctgtgccagtctgggcctgtttgcccttggggtccgttccttgtccttgctctgatctgctgggtgtggtcgggagccaatctctgtaggttcttgtgtcccaggctcccgtgtcactggattcaacccgtgggaggagctgctaggaggttggaaggcaagaggaatggagaagccagtgtttctacctccctcagtctccagaggccactctgatggcacctgcaactcctccgtggctccagctcccactggacggaccctatggcctgtcctctgtcggcgcttccagcccctgggcctcagtcctgccacctcccctgtgtctctctggcctgcgggtgggggcagcttcctgctgttgctaatctctgggttgctccattgcccccgtttgggttctgggatctccttccttgtgtacccagtgccctgcgttggagtctctcagttccagtgcccaagtggcttccatctcctggttggactctgactgatctagcaatgaaggtgacatggccccagctttggggtggtttctagtccagtcacttgacttcagcagcccattttctcactcttgattcctccggggattttctaaaatacacatggaatcgcgcttctctcccgttttaaacgttcttctagctcccccgggtcccctcgtccacccgagtaggactgcaatcatattgagctgctttcttttcctaaaggagctctacttcggttcagcccttggtttctgcagatacgtgccgtgttccaggcttggaagccctccccactcccttccctggacactctccctggacactctcatgctcttgctcttggccagccagctctgccttcaggactcagctcatcgccgtcagaggaagccttccctgccctcccagcctggatgcatctcgtcagtgcgcgggcacttgtgcgtcactgctggggattggcttgctctgggctgatagctttagttgtctgcagccaaactgtgggctccctgggggctgggaccagggctggctagtgtaccactgtgtctgggatgcctggcaatagatatcgaagcatctaggcatctgtcctcaggaaattctctcatgtttgcatagacacatacccaagtatgtgtcaggtagcatagtgaaaaaccagatggcctccaaggtcttcagtgaaaaaccacacggccttcaaggtcatcggtgaaaaaccagacggcctccaaggtcatcagtgaaaaaccagatggcctccaaggtcttcagtgaaaaaccagaaggcctccaaggtcatcagtgaaacccagacggcctccaaggtcatcagtgaaaaatcaggcaggtttcaaggtcatcactgaaaagccagacagccttcaaggtcatcagtggaaaaccagacggcctccaaggtcttcagcgaaaaaccagacggcctccaaggtcatcggtgaaacccagacggcctccaaggtcatcagtgaaaaatcagacagctttcaaggtcatcagtgaaaagccagacagcctccaaggtcgtcagtgaaaaaccagacggcctccaaggtcatcagtgaaaaatcagacagcttccaaggtcatcagtgaaagaataggtcagtatgtcttagtacattgattctgtggaatatgatgcagcaatgaaaaagaatgaagtgaatctaaaatgcatgactgtggaaagatatccaagacatgttattgtctaagactcatcacacaaatgcataacacaaaggtattttttaatatgtatatgattgcatagaaaaatgagaccaaggaaacaccctcctctggcaagagagtgggcttgaattcaggtaaaggggattttgttgcttttcacacttctcatttctatattattcaaattgtaatgacagccctgtattcacatattagctgtgaaattgcaaagtatgtaataggccattatgagaaagaaaaagccccacattttagccagtgtgtccttggagtctcccccgacaatgccagggaagtgggaaacattttttcctgaagaaatgtggagcagaggcgattctctgggtgtgtttaggaaatgatcccatccttcgggaatgccgtttttggagttcgacgttctctggaggcttgggagatgcagccagggcgcagagttggcagtggctgcagacatctcttttcaatgtggacctcctgccacagccacgagattcaaggattttctaggaaaatgaacgccagtggatgtgtggaattttttcacaaagtaagtgacgggggtccctttgcacttctcatgcccccatggttaattgtgtgtgtgtgctggaagtggaggagggcggtgggtggtgcagctgtttgaggactcacccttcttcggaaggctggggtcaatggggtgctgtttccccgagtcagttgaaacgcccatggctaaagcctgtggatcatctcacccctgcatttcctatttggctctcactttggtcgaaagacagcggagcgcagaaaatctgtcataattgtgaaagtaggacctgtcatcctctaagggtcattcttcctggcccaccgggcttgttgacacctggagttgggtagcagagagagggatgtcgggaccgtgaattaacagtggccaccacttcatggtgaatggcatccagacaacaccttcacctgtctggggaagaacataggctaggcctgggagaggctgtctactgaagtccctgcaggggtccaggctggactatacccctccagcttggcgagagagccaaggaccagcaagggaagtgatgtacgctgagaaccgtccgggcgcccagcacgggtcagggcctttggcttacaggctgtgtttatttctgagcagccctatgcagttggcattagcatcctaccgttcccactagccagctgggactcaaaccgattaagtaactgtctacctgcttcctgtgttctgtgtctgttggtgttgattaaaaaatataaaaggccaggttcatgcctgtaatcccagcactttgggtggccgaggcaggaagatcacttgagcccaggagttcaagaccagcctggggcaacatagcgagacctgcatctctatttttttttttttttttttgagacagagtctcactctgttgcccaggctggagtgcagtggtgcgatctcaactgactgcaacctccgcctcccaggttcaagcaattatctgcctcagcctcctgagtagctgggattacaggcgcccgcgccacgcctggctaatttttgtatttttattagagacggggtttcaccgtgttggccaggctggtcttgtactcctgaccttgtgatccacctgccttggcctcccaaattgctgggattccaggcatgagccactgtacccggcctcaaaatattttttaacagaagtagcagggtgtggtgatgcctgtagttgcagctactcaggaggctgaggtgggaggatcacttgagactgggaggttgaggctacagtgagctgtgatcgcgctactgcactccagcctggatgacagagtgagaccctgtctcaaagcaaacacacacacaaaaagtaaaatccctgtgattatatttttgctagtacttgctaagctgtagctgcttcaatttgagagcagagcctgggctgcccaaagaaagtcctgaccccttaactcagaactccgtcagcagaggaattgggttctctgggctgttctctactcaggcacacccttgctgggcctcccatgccccagggcagtccaggaaatagtgtgtgcatggtggaggggaaggaccttgactgagaccagacagggttggaatcttgggtctcctacttcctgtctctgtgaccttggccaaccatttaacctcacttgaggaaattgagcctcagtttcctcatctgtaaagtggggttgttatgacgataagacaggataaaacacatgaaacagccagcattttaccacttttaacctacagaacggcagtttgacatggctcactcaagtatgtccatcatggagatgcctcagtgaggtgctgggacatggtagactcagtaatgttcccttcctctcctccagccctcagtgttgaaggctttgtcatcctgaatggcgacgaatgggaagtgagctctgaaactgaaaccaccatttggggacaaaagctggcattgtagttgtggctctctgggaaggtctcatctgtcttctcggggctgttccctaaagctgtcattacgctggctttgcggcaggggtgcagcagcagtgggtggtgatgcggctgctcttgagtggcctggtggggtcatttcagtttcaaggccttggagagtgtgcttagcaggtggggcctaagatttgcatttcagctgcccaggtagtcaagaagcggtatagcaaagcggctgtgagcccattctctggagtcctgctggctgggtttgaaccccaggtctgcctcttgcctgctggtgcactcagccaagttacttcatctgtctgcctcgatttcttcatctctagtggtttctacctcagagactctgggagccacaaacaggatcccacttcttgaacaatgcctagaacaaataagcaatttctatgctgtagagagtgtttgcttacttaaaataatgcttattaaaaattggcgggtgcagtggctcatacctttaatcccagcactttgggaagccaaggtaggaggatcatttgagcccaggagttcaagaccagcttgggcaagatagtgagaccccatctctcagagagagagagagggagggagggaggaagggggagagagagagagagagagagagagagagagagaagatagaaagaaagaaaaagaaagaaaatcaagatgagctgtgattaataagtagggcctgattattggaacttggcattggatataattaagttgatcagaatttctcatgactggagagtcagacagtctgcccattgtgctgtgtgaccttgggcaaataacttaacttctctgagcctcattcctgtgtaaaatgggtgtaggaagtgaggaattaggtttataagaagggttgtgaggaggaagtcagaggctgcttctgggagggcctaatcctggtgcctgggtctcccgtaggagctgctgtcgtgagtgtgtggctaaattgtggggagctccctgggtttcgcatcctctttaaattagcggtggcatgtgtcagaaaaaggaccccccgccccctgggctcttcactgatgcattttgccctggagctttttgcagcctgggaacaggaatgtgctttatacaagatttaattttgggataaattcttgaggaacaggaggagggcttttataccaaaaaatggattgttctggaaggcttttctttgtcactgcccggtcgccgtgactgtggaccatgggaccctttcagccccgaggcctttcggcaagccttcctgagtggcctctgcatcattgcttgctgagcggatggtactgcacggttgccatggtagcagcaggatgtggttcctatggtgatggtcggcagtggcaggaagacagcagaggttttagttatctggtggcttcgcatttgccacccccccccgaatagcaaacacgagctgcccccgctgtcgttctgctctgtagaaccaccggtgaccgccaaggtcggctgcctccctgaaatgccactgcaggttcttggaaggactgggttgcaacaatagcatttctgcttccagaagaggagggggctgagtgtctctaagggtgcgtcacctgaggggagggtgcttatattcacactctgaacctagcaggtcgagtctgtgcggagcttcttcaaaaagcccctccctggagtgaattttcttttccttctaagtcttgtgtatttgtagacagatgtgggatgatgagctaacaggagaaaccaattggcttttgaagctcctatgataccttgtagatttcaaaatggccagtttagggggtcagttgggttttcaaacataagatacttttctacaattgggagttggccgagattagggaaaggagaaaggtatcctgagtgttcccttgtctttttggtatcctatatcttacagatagaatttctccaagaaaggccagtgtctgatacagtgaaatgcagggtacagaatattgtttcctttttatccaggaaggcgagaagaaaagcgtataagcaggatttcagaggtgctgttacaatttaagagtaaatctgatatttaggagccaagtgcagacggatgaggtttctgcttgtccattcacacttgataaggctgccactgcctaagacaagggaaatgtcagacatctttgcttctagctggaatcctatcaacccagtgtggcaacaccgattcgcccacgatgatcaggagctcccattggcgatcgatgatgtcactgggtttcctggagtgtgattggtgggttgggccctgtcatcagagccctaagccaggtggccacacctggattgacacaggagggacacagcttcagtgctgctccatccactgaagcacacccagagctccctgagggtctatgcagtgcccagtagagttctccttctcacttgaagtagccagaggccagaggggtgtcttctggcatagccatggggtgcctgggcctggatttttgttagaagggtgccatttagtgagcactgcatactgtgatagacttttcttctttttgaattttgaaaagtaaaaagaataaacacacaatttagcatacccaatcagtaggacatgtggcttcaccacctactgatgtcaagatgccttccaggttggttaacaaataaacaagcaaacaggaagcaaaagccacaaagattagtatcataaaatcgcatttctaccgccccgactagagcattgttagtatgttgtcctctttgctttgccttttttttaagtgaaagaaataaaacattactggaaaaggtataattacttgacattcacctctaatttactacccacctccaggtacccccttattgtaagtcccttgtgcatcttcacatttaaaatatttttacacacacacacacataatcataaacaatatataacatttctttgtatatggtttttttttctttttttgagacagtgtctcattctgtcacccaggccggagtgcagtggtttgatcacagctcaccgcagctttgacctctgaggctcaagtgatcctcccacctcagccccccaagtagctgggactacaggcacgcatcaccacatctggctaattttttggtagagacaggacttcgctatgttgcccagactggcctcgaattcctgggctcaagtgatcctcctgccttggcctcccaaagtgctgggattccaggtgtgagctaccgcgctttgctttgtgtatgtttttaaagttcccttgcagcttgcctttttccaccctatccgacgatgctcatgtgttggagatctctccgttgattcctgaatatctagttcatttcttttgattactgtggagtcactccctgtttgccatcttgttccatctgagtgcgaggcctgaatgggggacagactcaccccctgtcacacagaaggacgtggggcccacagtcacacggccgcaaggtgggtctggtaccctcccagcacattttggttggactccagaagcagggcttccctcacgatacctcaagcttacctgggccccggccaagcaactgactcatccagtctgacaaatccaaattctcgagtcactcagcccaaccgtggttgcctcatttagatcccagccaaacccccttcccgcgaaaagccatggtggcctagaacgaagtctggaaaagaaccaagaggacagcatcttttgtctggagagcaccgtgcctgttctccaaccacctcgtagcccctggtggagcctccctcctcccccaggaagaaggtgagctgagtcaccaccaggtaaccctgaacctcgctcagacacagcttcctttagctaggagcctggatgtaacacccagctcatcccttggctccctccaaacgtcaaggcgtcttgaactaaaagccagcgcctgcacaccggcagaactttgcagctcctggctcctgagttgtaggtgtttttgccaggtgtgcctgtacgtgtgtatgtgtgcccatgggtggacagtgtttctgtgctccttggagtaggcttatttttctgtctcttaaactggctcccttggcctctgcctctttcacgggttccatgcggaaccctctgacctgtgaggtgctaggcttgtcacagcatctattaggagacctgaaagacaggaccctgtaatgccacgatccattgcttataaaggaagccagtattggggtcagacagagctggattctctcaattgctcagcaagtgtttattgagcacctcctctgtagtgggctctgggggtaacatggcacatgaaacagagatggtgtctgtcccactggagcttagaggggcagagactgtctacaagtgacagagagatacagagagaattataagtctgagttcttcagccagtctggctctgctatgtcctagacaggtgaccttgggtgagttaactaagtcatctgtaacgtgttagccacaacctactaagctcgtggggttatctggaagtcttggtgagacagtgtctgcaaaatgcttatcgccaagccaggcacgtcatcattgcccaaggtatggcagctgcagccatcacggccctcattttgcagatgccgaaattgaggtcagagaggtgaagtaacttgcccacggtggcacagctcattagtgggtttggcggcacaggccctgctcagagccacccagcgactcagctgtcagtcacaagtgaggctgttcctattcttgacagtaactgcgccttcccatgttctgcagggagcatttttatttcttttctttcttttttttttttttgagatggagtctcattcctctgcccaggctggagtgcagtgttgctatcttggctcactgcaacctccacctcccaggttcaagtgatcctcctgcctcagcctcctcttagtagctaggactacaggcacatgacatcatgcctggctgataattgtatttttagtagagatggggttacaccatgttggacaggctgttctcaaactcctaacctcaagtgatccgcccacctcggcctcccaaagtactgggattacaggcatgagccaccatgcctggcccctatttttatttctttaaattattcatttattttttatttttattttatttgtttattttttcttgagatggagtcttgctcagccacccaggctggagtgcagtggcacaatctcggctccccacaaccaccatctcccaggttgaagcgattctcatgtctcagcctcccaagtagctggggttacaggcacccgccattatgcctggctaatttttgtgtttcagtagagacagggtttcaccatgttggccaggctggtcttaaactcctgacctcaggtgatccgtgcatctcggcctcccaaagtgctgggattacaagcatgagccactgcctctggcccctatttttatttccttaattttttttttattatggtcaaatacatataacgtaaggtttaccattttaaatcttaaaaaacattttttttaagagacagagtatggctatgttgcccaggaactcctgggctcaaatggttctcctccgtcagcctctcaagtagctgggagtacagatgtgtgccactggcctagccaatcatttttaaatgttaaagttcgttgagtacattcatattgtcatgcgaccatccaccatcatccatctccagaacactgtcatcttctcaaactgaaactccgtcctcattaaatgatagctccacattctgcctactcccgacccctggcaatcacttttctgctttctgtgtgtatgcatttgactcctctaggaacctcgtatgagtggaatcagaagatttgtctttttgtgactggcttattttacttagcgtaatgctctcaaggttcacccatattgtagcatgtatcagaatccttttttttgtttaaaggttgactaataatacgtgtgtgtgtgtgtgtgtgtgtgtgtgtgtctgtgtgtgtgtgtgtgttcgtccattcagtttgtccgtttgcatttcagttgcttctgcgttttggctttgagaatagtgctgctgtgaacattggtatataagtatctttttgcatccctgctttcagtttgtttgggtctatacctaggtgcagagagcattttctcgtcaggagtaaaacaaaagggacaaaagaaagctcctgacttccaggaattctcaaccttgggtccttggatagaattcaagtgatctgtgaacttggatgtggcattttaaaaaagacatctttatggtcaccaacctgtaactgaaatttagcatttgtttccatgacggctgtaggcagtaccaatcacagtggtgttagcagtgcctgtgacttagtcatcaatagaaatcgcgggtgtttgcatatttcattcctgttgttgtggatatcttggaatatcattacattcatcagtaccccaaagttacagtagttatcaggcccacagctaggtcttgttatacgatggattaataaagaggggatctgttactccattggaaattttaagggatattttgatagctgtttttcattatgatcagcttcctttcctttgcagtttcctatttattttatacttttaagaagattactctaagaaggggcccagaggcttcaccagactaccaaggggtccaaggcacaaaaaagcttaggaagcccactcttgccttgcagaggtgcccccgggaggggtcacagtgaaggccccagcccgccagaggagcaggtttgcgtttggtttctgggcagctctgtggaaggcaacccaacttcctttggaagggccctgagcctctctctacccactccaatataagaagagaaattttgctttataatgagcaggaatcttctctcagttccttggatggctttggacatgttttgagtttgtttggattcccaggagtgagcacacagggcgtgagctttgcagtttggggcctggtttctgaagaagttgcaaacagggtgatggtgcagttcagacaacacgcgcgggccaggcaggcctggacctgaaaggaatgtgttttcttggtttttgtctgctacagaatttctcagctctccagctcgttggctcaaagtgtgtcaggaaagggggtgctgggtaacaagacgatggtggagagtgaggtttgcagacacaccctggcttggccgggagcccacggtgggggaggttggctgagtgtgtaagagcctttgggttcacagcctgcatgccagaaatatcatttatcgtcagtaataatgataatgcctgatggacgggtaaaggaatagctagataccagaaaaaaacaccaacagggacatgttcattgtagaatctaggtggtgggtgtaagggtattcatccattcttttcttcttctttctttttattgaagtattacttactttcaaaagtacacaaccaaatgaacagctccatgaattatcccatctcatggacctaccaccaggctatcagttggattttgtttctaccatggaagcatcctcagacttttcccagagaccacccttcatcctcctcccccgcgataactctcctgaccacagtgtctgtgtttatttagtttttttagaagcttcaactttacagaaagcaaatcaatgcgtgttcttttatgtctggcctctttggctccacatgtgtttgtgagcttcatctacattctgtttagagctgaaggttatttatttttgttgctggatcacattttatcctaaaaatatcccattctactgacggtgggcattcacgttgttgccttcttaggcttttatgaataatactgctaggaagtctcttgcgtatgcctttttgggaatgtgtgcatgaaattctgttggcttatagttaggcatgagttgccattcgctggtattgcataggttcaccttttgtagagaaaaccaacctgttttccaaagtggttgtaccagtttacattcccaggagcagtatgggtgatttctggttgcttcatatctatgccaacttgttattgtcagtcttttaaattttagccattttggtgggtatataacagtattcaacttttctttaagtctgaaatttttcataataaaatgttggagaaaaatatccttcacattcatgacaacttcatagaaaaatagtatttttaaggagatggttgaaattggcgcttgtctggtcttggagtgaagacttttttttttcattctaaacaatgccaaggctggcccttcctcctatgaccctgtggctccccagtccaccattggtctcatgctgaatgctggatacatttttaaaagctgggtgtagccagagacaggggcccggagtgaggttgggagtaccttgaagctgtgctcatgcattgaattgatatgaccagaggtggagcgtggagctggttcctggcctggtagaagttcttacactttttgctggtcccagagagatgtacttttgagtcagcctgggaaattaaaatagttcattgagttttggctaattctggtaactattcctagaatcctcctggtcattggtttgaggtcacagctacctgcttgctggggcttccctctctgacttagcacaaatgatgcccaagtcttgagcttcttcctcatgttgttaactgctcagctgagttatttcaatggcatgaaagaaacatagaattaaggtcatagagcatggtcctaattcatgcctgctcgccctgctttactgccatcatcatctatctccttgctttcactcaacaaatatttggtgagcgcgatttttttgttaggcactcacccatgctccctcccttcctttctcctctccttcagtttgtttgcctaccagtccatgcacccacccgtccatccacccacccatccctccatctatccgcccatccctttatcccttcatccatcacttactgatggctttacccattgtaaatcaggccttggctagatacagatgaatgagctgtggtccttgcctttgaagtattcccccatactgtgacaaatgattaaatagttattcataatgcagcatgacacggatataaggggggaagaagagagaggtctctagggcaggttgggaggatgaagaaaagctttctggaggtcacaatgctattgctgcatcttgagaatatcttgggatgggcccgtgagggagggtaaagagagagattgggggcacatggtttctcagatggtacatgatacagagggtagccatgcttgggacactcagtgagccccgagtcaccgagtgtgggtgggcagagtgtgaggggctgggtgacatagatggctctggatctgtcagcagtttggttggggcttgttggtcttcgaggagatgggctgtgaaactgtggggcagtgagatctgtgtggtggacagactcatgggccctcaaagatgcccatgtcctactccccagaaatggaatatgctgcctgcaggatgaagaggattccgcagaggagactgggttgaggagcttgggatggggaggttaccctggattatccaggggggccagtgtcatcacaggggtccctaccagggacagagggaggtgggagagtctgagtctgaggaggagatgtgcggaggcagagagcagccttgcaattcccggctttaagatggaggaaggagccaccagccaaggaatgcaggcagccttggagaacgggcaaggatactccttctcctctggaggctccagaaggagccagccctgcccacaccttgattttagccttgtgaggccgtgttgggctctgacctcaagaactgtaagagaagaagccattgcgtgtgtggccatttgagcagccataggaaccttatacatgggcaggtgcagggacatctgaaaacctttgtacgagggtccgcattaacagtgagaggatagggtttttggctggggacagtaagaccatcatcactgcgtgaaaaccttctcaaagagtccatctttcagtcaggccgctataaatttatctctatagatcattcgttgttaaaattaagcccagggggaaaatcagactcattcaggatcaaggaaagtcacagaatctgatccattcctaccagggtcccacgtcttatgaggctccagccttcttactagaggattctgatactttattaccccaggcgaatgtgatttgagtagagtcctgcttttgggggaaataaaatcccagtaaaggtggatccggatccctcagggacctaggtgcagttcctgttcctcccgtctcgcctctgttgcgctgcaaggtggggtgtgtagtgagtatcactgtaacctgtacttttctaaagtcaaacagatttctcttggtgggaggacgtgtcttttgtgggatcggtgtagcccgtctgagtcagtgactcacctggcacccctggcagctgactttcctggcagttcactcgagtctcttgcctctgctcacaaaagcctgcgcctttattcagctttcctcaccgcttcccaaggcagagcagagcctctcccgcccgcctcccacatctctcccttagctgggtgcccgcgtggctgctacctccgaggcttctgtgtcaccgggtagtggaaatgtcaccgagtgtcagagcttcgagcctcctccagatccatccaaggtggcatcactaagtggcatttgtgtgctaggcacgtaccctcttttacatacattatcttcgatcagttcagcttcttctgcataaaaaagaaatttctctaccgtcccagggagaataattggaaaagcgagccctgagtactcagcccacccgcccttctcctgctgaactgtcgaacgtagccaccagctagcctgagcttgttctgatgtcttctgggatcgtcattgttatgggttgaactgtagccttcaaaaggcacgtttacgctgtagtctctgtacctgtgagcatgaccttctttggaaatagggactttgcagatgcgaccaagttaagatcatgctggaggtcatgcgggaggtcatgctggaggagagtgggcccaaatccagtgactgtgtccgtaaaagatgagggaaacttagacacagagagacacacagggacgagcaccgtgtgacagcagagacagattcagctgctagccaaggaatgccaaggattttggcagccccagaagccccagaagctgagagaggtgtggagcagatcctgcctcagagcctccggaggaaatcaaccctgttgacatcttgacttaggactctcagcctccagaactttaagaaagcacattgctgatatgcaggccacctggtttatggtctgttgttcaggaggcccttgggacatcaatgccctcagtccagtctcgattctacgaccctacccgtgttttgtttttcacaccaggccgtctctacccgcatggttagtgctgaccaagtaggaagttgggacacttgaggcatctctgtgacgtgctcacatggcttgaggaggctcgggccacacctcgaggggcaagcctgggcctgccgcccgacctttgcttggagaactgggttcactgggtttaagaatcattccttttccttccaagttaactgctttcaagaggtcaacccgtgtgtcatggcttttcccagactggctgattcaaaccatgtcaccaccaggaagggggaaacagaagatgattgactaagaaacattcatttctgttgcaaattactagttggggctagttgttgattatctcacctccattgctatttgtatttagaaatggctcataaatttgcttacatgggtttggtttgtcttctaaatgaaatgattgcactgcacatacttctaaaactgtcctgcgatttgatagcttccatttcatggcgcttcttctggatgtcaggcactaagtcgggcgctttattctgtagttctcctagcaatctggtgagctccactctacagataaggaaatcgaggccaaggacagctaaagaagcgaggtgcgcaaggtgcccaggtccgaagtgtttccgctgctttcagactgcagtcccagggctcaggagtccatgctttctgcgtatcttcacgctggccacggatcacctcatcattagatgtcgaagttgaacaagtggtgttcacattcggacgtgtgttaggtagaagtgtgtgtgcacctgcgtgtgcgtgtatgttccacacgctgatgcaggaggtatacgcacagatataattgtcttttagaagattgactatcactaattttgaaaaatttcctgaatgacctttcctgccaggccaatacattgagcccaacagataaatccctgaacttattcgcagtctctaagtacctttagaatcccgggggtcgccctgagcctccccagggactagcgctgttgccctcgctcagtctcgccaccacaggaggcctcggcttgcccagcagctgagtcgggagaacctttcccaggtcccgaggcagcgggaggcgaagccaggagacccacctggtgccagggaagagctgtcacctgggcctttcctccaggagcctccaaggaaggtggaggtgtgacatcagagtgttgggatgtggaggggtgtgactccctgggatgcagctctgtgccctgactccagtgtgccatgcttggctgatctctcaatgattaactgtgtgaccttggacacaccgtgttgcctcctgcgcctctctgcccagacagcatggcaagtgaaagcctccctcccttactgatggtgtgatctgggctgcctccttggacacgccaagcctgctgtgcctcgaggcctttgccctgactgcttcctctgcctgggatgcctgttgtctaaacacccacaccacacgctccctcgcttccctcctgtctcctgtcagaagtcacctccttgggctgtccttgatcattccatccatccaaaaagttggcacccactcccacaattttttatttctcgttccctgacttacgtttttttctcctgagcatatgttatcatctgacagaccacgcgtttcttacttattttgtttattattccatcccactagaaaggcaggggtttgcctgttttttccccatgactgtatccccagcatttagaacagggcctggcacctgctagatgctcagtacatagttttgagtgagtgaacgaatgaatgaatcatcagtcagtcaaactttgcagcactcactttgtccattggaataaagtttgcctgttaagtacatggtagccactcagtacatggtagctaaggttatgtgcatgattttttatattattgtcattatgtgctttattgtttttatttttatttttatttttttgagacggagtctctttttgtcacccaggctggcattcagtggtgtgatcttggctcactgcagcctccgtctcccgggttcaagcagttctcctgtctcagcctccagagtagctgggactatatgcacgtgccgccatgcccagctaattttttgtattttagtagagacagggtttcaccgtgttgcccaggctggtcacaaactcctgagctcaggcagtccacctgcctctgcctccctaagtgctgggattacaggcatgagccaccgcgcctggcctatgtgctttatttttacaatcagagggctgcactagcagatctgagagcatgaccggggtggagtccatgcagggccgcagggaacactagtcagaaggaggcagtgaacctctcctgccctttccttccatctccatcaccttgagcatcttctgggcagctgaggtgaccgcagatgggaaggaagggcgcagagatgagcattttcttctctccaccatctggttccaggcagggcaggagagggccccgtgagagctactgctcacggctaccacggctgcctgtgggtcagagcatctccacgctggagctgggccacactggttcctgcacccgggcagcctgtggccaggctgcgtttcaaagccaggactttcaggaatgcacccttttgaccacacagcaaggccacacatacccaatagcagtggactctgagctctttaaaattgtgaatgttgcccagtggccctcagtcaggatttgttccattaaacctcattcactgccctcattttatgggtttgttgactgtttgcatttgctccgcaagttgtttatattctttgtgtgttttattttcaattatggcatgtgtctttaaaaaaagattgtaagggtttcttttgaaatatagaaaactgttcatcctttttcaaatcatttatgtagcagttattactctccaactttttttgtttttctagtctcttgattttgtttgaggtatttattgatatatagaagttatatatttttctgtggtcagagttgagtgtcttaattagtgacttcttaattagtgtcttcgtggcttagagagttcttccaaattttaagattgagcaaacattccccataaaaaaaaaaacaaaactatagaactgtaaaattaacctagaactaagcacctacacccaggataaatttttggtataaggtgtgaggcagggaataatgctattccttccctccaaatagttaatggattgtctgttatcattcactcaatagtgtgcccttttcccattgctttaaaatattgctattatcagatactaaatttttcaaatatgtgctaagtttccttttaggctttctgttagttaccactgatatactgtccttgctctgccactgtgctgttttattccagcttcatagtgttttgtttgtttgttttttgagacggagtcttgctctgtctcccaggctggagtgcagaggcgtgatctcggctcactctaagctctgcctcccgggttcatgccattctcctgcctcagcctcctgagtagctgggactccaggcacctgccaccatgcccagctaattttttgtacttttagtagagacggggtttcactgtgttagccaggatggtctcgatctcctgacctagtgatctgcctgcctcaacctcccaaagtgctggcattacaggtgtgagccaccacgtggcccataatttttttaaaattgagccctctccttttaaagatgaaggaactgaggcaccagagaggtcaagcaacctgcccaaggtcacacagccaaatgctgtctgagaatctcacatgcataaaattccagtgtatttaaccttctcgtgggctgtgtctcatgatgcttccctgtgcttctttcctgtcacttctgctcatggtatagcactggaatgctttttttttttttttttttaaacagctgttgtacgttctttctctaagtggagctagtcagaaaaagctgcatgaagctactagcaagaatgagatcagacacgtgaattttgtagtactgtgcctggcatagaaaaagcccttaatctattagtaataatacaattattattatttccattgatgttgactttttgtaaggtacgtcctcatttgaagcatcagtcagtttggtgatcagttgcccttgagtgttcagacactcgtttacagatgttggaccctgttacccaccttcccctcccaccataaattaccgaggtcaccccagactctgaactggctgacaagctgttacagtgatagaaagttttgcacttgagcattcccacaagctcctaggactccaggtcagtttacatgttccaggtttttgagaaaattgtccacgctgacttcaaggcgagagcatcttggatctcctcccagagagagtcgtgtcacctgagggcccagggaacctcggtgacaagggacctcttgtctgctgtgtgctgtgggctgatgtgatccctgtttgcagtgtaaactcataagcagggacccgaagcatcccccgacccctggctttgcagagcagccataaccagccagtatgaagattaatttccctgtaaaacctttgaaatcaggtaagtgttaattattaaaatttcacgaggagaggcttgtttggtgtgaaggcttccagcttgctgagggtgacctggaacttgttgtgaggatgaccaaaggtacttgggagtgctccttgccttgctgtggcaattggaagtcttcatcttaccttgcgccatgcagggagggtgtgccctggatggacccagtgtggcctgtgtgcttgctattcggtacctctctcacctgtcattaactcgggggcattataaattgatcgtcaggataagaatattctcttatagttcatctttttaaaaaaatggtgataagatacacagaacataatgccctgtcctaaccatttttaagtgtgcagatcaatagtgttaagtatattcacattgtagcacaacccgtctccggaaccttctttctataaatgcagaattagggttggctacctcaggtggacacctggttcatgacctttgatgaagtgggtagaacttatttagagcaggaggccgagggacaacagcaccagcctttgtggtaggtgttaatacctctcatttttcagatgaggaaactgaggcactgcttgtcttttttttttccagtaaaatgttgttatagaaacatacgtgcgtcacatacatccggaagcatgcacacgtacagctcagtgaatttttgccaactcagcacgcacgtgtaaccagcgcccaaatcaagagacaacatactgagcagtaccccaccccctgccctgcacctcccgccagccgttgctctccccaggggtaactgctctcctggcttgtatcagtgtctaatggttttgcccgcttgtgaactccacatctgtgcagttgtttggcatgtatgattttgtctggcatttttcccatgacatattagtgtgactttaagagtaagttgctggaaacttcaggaccagtcatggcagaactgggctacagactcagagcagggtcccccctgctcaccgtcctggccgtcacaatgttcacgtgtgagcctgccttggcctggagtgtcggggcatcctgagaaataaagttggatagaaacgccccatataggctgggggcggtggctcacacctgtaatgccggcactttgggaggccgaggtgggcggatcacttgaggccaggagttcaagaccaggctggccaacatggtaaaaccctgtctctactaaaaatacaaaaattagccaggcatggtggcacgcacctgtagttgcagccacttgggaggctgagacaggagaattgcttgaacctgggaggcagaggtcgctctgagccaagattgcaccaccgtactccagcttgggtgacagagagagactccgtctccaaaaaaaagacaaaaaaaaaaaaaaaaaaaaaaaaagacccaaatagaggctgggcacggtggctcactcctgtaaccccagcactttgagaagctgagatgggaggatcgcttaaggccaggagttcgagaccagcctggtccatatagtgagacgcccatctctgttgaaagaaaagaaaagaaaagaaatgccccaaatgggagtttggtgaaagttcagtggaggattagccatgaggatttcaggagcctcccgctttgagcagggaaacaccctgtggtatgaagtggcagcaagagattggggtggtgggggctgcatgcgtggggtgcagggcaagggtcagctgaaggtgtcggggaactcacagagggtggagagagccctgggtgcagagtcttggccgtcaggccgaggcgggtgggaagagacccggcattccggacagaacaataacaatcatcgtttccactcaccaggggcttgccctgcagaagacattgtgcctggtccattacacacacaccacagtctcgttgcatccccctgtaaccctgtgaggtagctgctatcattgtacccattcttagatgggggaactgaggctcaggcaagtaaaatgacttgctccagattagggaagtggtagggagtcaagaggggctaaggcctgagtccgtctcattctcagagcgacacccataagcatgggctgcctgcccatggaaactcataaagtagagacacttaagacataggcggcccccggcggtggctcctgcctgcagtggcccagttgcataaacactgagagaaggctgccgaatttcactctaaggggttgttggaacaaagttgaaatgtggtccaaaacagcttcatcatcattagtgaatgtgctgtgggttagctttttattttctcaggggatttgtttggggccagcctgtgtctccatgttcttacttcgcgagctgagtaagttgatatctgcaatttaagaagagcctggttttgataggaagttgatttgattaccattttataagattttcttggtctggtcttgatcctgtggatctcttggtttcagtaattttggggtggtgatctatcctctgccatttaagccaagtcacactgatgttgagtccaccctgaagaatgtgtcaggatattctcattccaaggaaatagaaaaaggcattaagttcaaaatagcacgtgatattccaaaccaagactttgttatgatcttctcgggcaataatatgattatcaggtttttttttcacaggcaagttgattctaaggtcattaattttatctgtatccagtggaaattgtgttcattttaaattaaaataaaatgaacggtgtccatctgtttgtggaaacctgatctactaaggttgatataatcaggctatttacaagttcactgtgggtcagacaacagtatttatattcatgcacacagaaaattcgattagatagtgccgaggaagagcacacaccgatgggccgattaccctgaattcaggcagctcagattctccattcgcttgaatgtcatattagctggggatatcccttttgtgacgcagaatcttgcagcgaaacagttgggtgtagcctcctgtgagaaagaaatgcttgcagcagggattttccaggccggcatctcaattgcacagaaaaacattttgggaatgtttccatcagcccggcagtctgaaggtttgagcggaatggtgagaaggttctaaccaggcgtccttgggggtggaggatgatgggccagggcagctgcacaatgtctggctgttcagggggtcttgaaaccaatgtctgcaggccctgcggggatggatgcacacaagggccgtttgaagcacagatctgctcaatcattgttttctgctgggagtgagagaagggcactccacatctctgctcaagaatccttcatgcttcgctgttgcttttaggaaacactccttgttctgatcaggactacagggctaggtatgtttctgtctggccctgcctctcccactcttactgcacctcggagctccttaactgctcctaccctgcgtcctgtttccttttctcagctggagcctcctccctaccacctgaggcccgcagttcctgctaagagcaagactaagcttccctcctgccttcactcactcattcctaattccctccgcctcatcttcagtgccacctccactggaccttccatgaccattcccccaccacaggacagtcattctctttatgaatgcacagttcatagcatgtgattcatagcacaatttacatgaaataataaccaactgtccattggttgctttatgtctctctacgtgctccgtgtgtacaactctgcccccagccctgagcactgggcctggatgtagcagggaccaccatgttattggtgaatgagtgacagaaacaaacgatggcagtgaacgaagccgaaagtagttctctaatttgcacagtaatctcagccaccttgaaaggtcgtttttagtgtcacttcattgtgaatttgtcagacgtggagcacatccatccaaacggaaagacgaagcaagggccgaaagtacttgctcaccagggcagcttagtgaccagcatcgctggcctttttgtgtctcgtcagagcacactgatttgatgagtccccggctttccttagtcttgcctgttggagagctccatcctgtgccgcctctgatccgtgagatgggcttgctcaccctggctgagtctcactttgttgcccaggctggagtacacgggcacaatcacggctcactgcagccttgacctcccaggctcaagtgattctcctgcctcagcctcccgagtagctgagactacaggcacaaaccacctcgcccagctaatttttgtattttttgtagagatgggtttttgccattgcccaggcagggcttgaactcctgggctcaagtgatcctctcctgcctcggcctcccaaagtgttgggattacaggcgtgagccactgcacctggcctggcctcttctttgaagccagttaaatgtgtcttgttttgagtgtgtgtgtgtgtgtgtgtgtgtgtgtgtgtgtgtgtgtgtttgtttttgttatgagacagagtctcggtctgttgcccaagctggagtgcagtggcgcgatctcggcttactgcagcctccgcctcccaggttcaagcgatgctcctgcctcagcctcccgagtagctgggacttcaggcttgtgccaccacgcctggctaattttttgtatttttagtagagacagggtttcaccgtgttagccaggatggtcttgatctcctgacctcatgatccacccacgtctgcttcccaaagtgctgggattacaggtgtgagccactgcacccggccttttttttttttttaagttgcatacttatcagtccgtgggcttatttgttttgggtgctgaacccctctgttaagtcttgatgactaaataaacacaattcaattatgtactatatatataagtatattattcttgtgaaaagcagtgccttaacagaaaagtctgaagttccccttcctccacccccgaccctgttcctaccccatatcccatccttctagggttttttcctttatatttacattcaaacagatggttctatagaaagtatatggtataattttatgtgagtttctttatttaaacataaaaggaatcctgtcatatagatctttctgcagtttacttcttcactcagtgagtctttttggagatgtgttttggagatgtgcacggtggagccgtgtaacctgtaactttcagtggcagagggctgtgatttcataggcccagccagtctaaccactccagcccctgatcggtgccccaggctggtaggatgctcttgggaccctcacacgcttcttccatgagttgagctgtttgtttaccaaacctggttacgctggtgagaggtgttactggatttacacagtttatttgaagattacataaacttatgaaatatgagcgtgaagagagaacggctgtctttatgaaagctgaatggaatgcttaagaaagtctcagtggagtggagtgtccctacaaaacaaccgatgttgtgggtgagagaactgtaaaagaacaggaaaaagctgtaatgatcagacagccttgagggggtcttcagagaaacagaagctgcagcttgtcaatcaggcatcaggcatgcgtttatgtgaaaacgacccagaggccgtctgcaaagggaaagcctcatctctactacaaaagatggagaacatatacacctttacatacttttagcaaaaacgaaatgtctatttcatgttttaattttctcctttaatggactcctttgggttcaccactcagtcactggttctaataaccaaagactgaccttattctgttcagctgccacatcacattccataaaatggtcgtgccccaccctgggtcgatggatgtgaaggccctttctcgcttttcactcttaaacacagcccaggaacaagctgtcttacctgggactctcagtagatgctgagaggcagacttgctgggtgtggcattccaaattttaaaagcagcaggagttggttgattttgaagttgaagactcctaggcggggagctctgtgaaaatgggagccaagtcttttacctgtgaatgagaattaaaatgggggccaactattaaatgctcggacaccccaccagtgcttagatctgtttgtcacgcaggcatttcttgagtcccagttgtatgctctgtgaggcaccgagggtgggagatttgtagcatggcgtaggttgggagattggtagcatggcgtgcgtgatcttgagaggcaggtgaaactggcctgcatctgggaatagggtctgcaggagtgtgtttttctggaccttcatctgagggtcgtattctccatctgtgttagattgggctgccataacaaaacaccatagactgggtggcttaaaccacaggcatttattgtttcagagttccaggtcaaggtgctggcctggctgggtttgggtgagggccctcttcctggcttgcagacagccaccttctcactgtgtcctcacatggtagagaaagagagcactctggcctctcttcttatgaggacatttatcctgtcatgggggccccaacttcatgacctcctcaaaccctaatcacctcccaaaggccccacctccacataccatcacattgcagggtcgggggttcaacagaggaatttccgggaggcacaaacatacaatccatagcaccgtccctagcacggaagaacagagagaaggaacggtttacattgcagcagtatgtagcttgacttgtggcttcactctctgggggattgtgaattctgccccaggcctagcgagaggccgcttgggagccagtccgttccacggggtgctggtctgagccctgcccgctggagcccatgaggtggcaagggcccaggcctggctggtggcactgtgtgtcactgcttttctgctgatggcttgctgtgtggccttgaagttgcttcgctccaggtgagcgcatctgagaggtgggctgggtctgactttgggaatctgaagactgtgtggttctgagatggcaaagtgacacctgtgggccagcttcctggctggaagacaccctctcctcccttccctaatcatgtccagtgctacacggcagccggagagcgctctttgttggtcccgtgagaacattcagaaacaatcatacccacccctgtagctggctgcttattgccaaggcgttgcgttggctagtgtccccacattgaagttcagggccgcccagggctccctgctgcgtcctgggccagcctgtgacctcccttttccagcagagcagcaggactgagggcgctgaaaggaaggggggtcagggtcgtgggggtaagatctgacccttggagccagacagcctgtgttcaattcctggcttttatctatgaccatgggctagtcacttccccccgttcctcagtttccccacctagagctaaggtgaggataaaacaagctactatcttagaacagtgcctggcttctatatcaggcctaacaaaggatggggatttaattttctgaaacaaagagaaatttttatttggctcaggcagtctttccttccaaggagataactaagtttgagtcattgtttaaaaaatcaacttccactagtccagctatgacccctgaaatgccttccatttcaccttctactttctgtctaaagaagagggtttactgagctaattgcaggtctgaatcgtattatcgggaaaaggtttatcttacttgggagaacacagctattttaaggagctttagcacatttttattgcatccacctggcatgagaaatctccattgtgagcctccttggggtacccattcccattagaaaacagttcatcagcccagaagaggggaaaggagagagagaaggaagggcaaacgctggacacgcaggggtccccccgccccaattatccatcatttgtggggttccacatgcacctagtgcacagtgagtgtgaactcacggagacagactcaagtcatgtgcacgcatcccttttcaatgtgggtgctgggcagaggggtggcttcagctctcaaatgagaccgaggctggagggtcatgcaagtgaaaaatactcaattttttaattgcaaagtctctttggtgctatgtgtgtggcgtgaacacgtgagggcattattttgaaagaattactgataggactctgtctcatcctcagggggtaagtgtgtgtgtgtgtgtgcgcgcacacaggaaacctcttgtttttaaatatttccttctccaaacagcctgccgctgaccttcccggcctctgtgtggctctcaggccacctccttattgctatatcttggagcctaaggacttctatttctgctctgggtccagtgcagggtgccaggaccaccacaggggtgcatgtgtgcatgtgtgtgtgcctgtgtgtgtgtgtgtatgtttgaatatgtgtggtgtatgggtatttgtatgtgtgtatatgtttgtggaatgttgtgtgtatatgtgcatgtgtgtgtgtgcgtgtatttgtgtatgtgtggagtgttgcgtgtgtgcacgtgtgtgtggagagggtgtatgtgtgagatgtgtgtatgccatgtgtgtgcgtgcatggagggctctgcttccggtttctggggttgagtaactttatgagtggtacttaaaacccttctgttgtccacaggacaaagttcaacccctcatttttttggcagagaaggctgccaaattggggccagactcaatcttttcattttcatctcctgccagttccttaccagacaccctgtgctccagccacaaacgaccttttgctgttgcccaaaagagcccatgatcttgtaaactcctagactcctagaagatgccaggcccacagccagggttcccctttccgctttccctgctcagctcatactggtgcgaaactctcccaggcctgccctcctccctgcagggtgccttagcttcttccatcctttgagacaggctgaccacaggtactgtggtgtttgatttaatgcattcgttatctcaggatttgctgcgcttctagagaagtcctgcagacgaacccgtccttgtatcaccagcgcctagcatggtgcctggaagagggtgggtgcttgatgcttctcgcagtgaaggagcagaagcttaggttctgtactaagatgatgcttatattgtgtagctaaaagggaccgtgcacacaacagtgacaacatcagtaataacgtttactgagcgtctcctgtgtgaagagtccctgtgctcagtgctctatgaatggcatttaatccacacagcttatgtggcgagctccagcatcctcctccatctacagatggaagcatgaggctggagagaagtgacttggtccagaccacacagcacggggcggacctgcgatgctcacggtaaaactagggcaagttactacttgactgatctgcttctgttctagaatccgaaccctcctcagcattgtttccaaatgatggtggttttcaagctccaaacgcccagcttacctgggcatagaagccttcctgccggccctcccgtgggccccagggtctttgcacaggattttccacacacagtacaagtctgggtctcggctgaatgagcgagcacgggattcccacatgcctgtaagagaattgctaaatttgcttcaagcggtgtcaccccctcactgcaggtagatctagtgaactcagggagaatccaccgtgacctacatcagaaggaagtgggacggggcggtgggtggggaaaacgcaaatggcgctcgctgtgaatagcagtgttggagaacatcacagccagcagtcgaggatgaaaggcatttgatttataatagactctcaaattcaccctggttcttacgagttatcgtgtctcctgaaacctcgtgggggcatcctgctgctggggccaggaggcagggaatggcagcccagggaaatgaggaatcccgatccttctctctgagtcaagagaagacagacttgccctacttctcccatggtgtcctgggagagcaggaagaaggcatggagaaggatgccttgttcgccggcggcagaagctccctctcaatgccaggcaggacagagccagcatgtagggcggcggtccctttagcaagaggatgaactgggctggaggtgcactcagaaatccacccagagggagttttccttttcatgacagttttcctgaggcttggtggggaaggagaagaggctctcagttgcaggcggttcattcattcacccattaattcatctaactaatagttactgagggtctgtgtcccaggaaccgaagaaagcacaggttacagcaatgagcgaacacagttgtgtgtctcctgcctgcaggtagctgcggcctcgtggagaaaattgaagtcagatgattatcgtgcggggtgagaaaggagggtgagaaccaagtgctgttcactcatcattcattcattctcttgttcagggggtgtggagcactggatgggagctagacatccctctagacctgtgctggctggaagagtagccgctgccatgtatggctatttacattgaattaaaattagaccaaagtaaaaattcagcttgtgaggcacgtagccacacttcagtgctccgtagccacgcgtggcgaacagctcttgtactggagagtgccgatgtagaacattccctgcatcgcgagagctccctggatggtgctgggctgcaaaggccactcccccgggagtgcacagccttgcggtattaaagaccggcacatattctgtgacagtacagggcagtctgggctgggatgtgggcacacagatgtgggatggccgagccatgcctgggctcccggaggcagggaggtttcaatggtgtttaagtcaagtgaggaggatctggggcagaggaggagagggatagcatatctggtagagggaagcacatatgtcaaggcctggcctccagaaagagagacggaaggggttcagcgcggctgggtcgtagaccatgtcatgtttatgtggccgagggcatggggtgtgtgcagcgagggtgactctggagggggacacagaccagctcctgcagatgctctgccatctctgcagaaagacccccgctccaggctccctgctggcccttccagtcagatagagggtctttgcaggccatctcttgctgtgggcacgctgagcagagggtcccaaagccagtgacaaccagttcagaggagggcctggtttgcggggtcagggctggacaccttgctcagaggggtagctgggccttggagacaaacttaccgtttcaggcaaaagcgagggtttgcaggtggagggtgggaagcgggggaggaggaggaggaggaggaggaaggaagggatctcctcagaagcctgcagggtccagattgagtgtccgttagttcagtgtacccaagaaaacacttcaggaaatggcccctcttccctttggggaagtgcaagatgaagaagaattggagaggctggctcacagttgtggggcagtgagggggaatttggcagacaccgaaattggacactgggacccttggcctgggaccagcttgtgccccagggccaggtgctgtggcaacaaaggaatgcccagggagccaggcaggcctcttcagctctgctcttcctgtcacccgagcaactcgcagcctctgatcccagcctcctctgcagcacgccggcaatcatgtcatgctgtaaagctgttggaacaatttccagatcattacagcggctggcatttatctagggcttaccttgacccaagcattgtagtatatacatcatgatttttcagcctcagctctactgacatctaaggatggatcactttttttttttttttttttttgagacagggtctccctctgtccctcaggctagagtgcagtggtacaatcatggcgcactgcagcctcgacttcctgggctcaagcgattctcctccctcagcctcctaagtagctaggactacaggcacaggccaccactcctggctaatttttaaagtttttgtagagatggggtctcgttttgttgttcaggctgttctcgaactcctgagctgaagcggtcctcttgtctcacctgcctcccaaagtgctgggattacagtgtgaggcaccagccagctggatcagtctttattgcgggcactgtcctgggcatggtaggacatttggcaccatccctggcctccactcactagatgcccacagcacccttccaccccagttgtgacaaccaaaaatgtctccaggccacgtgtggtggcatgcacctgtaattccagttccttgggaggctgaggtgggaggatcacttgaagctaggagttggagaccagcctcagcaacatagggagaccatgcctctacaaaaaaaaaaagaaaaaaaaaagccaggcatggtggtgtgtgcctgtagtcttagctacgtgggaggctgaggcaggaggattgcttgaggccatgagttcaaggctgcagtgagctacgatcatgctgctgcactccagcctgggtgacagagcaagattctgtctctgaaaaaaacaaaaaggaaaaaggaagctgtgtctggacattgccaaatgccccccgttgggaaccactgctttacacattgactccttcattctcatagcaacccatttcacacacgaggattgacttggcaccacagctggaccattggtgctgaggtttgaacccaggtctgtctgcatgggcctgtactcagttcctggatctattttactgcaggcttaggtggaaagggcgtggcccaaagccagatgtgtagtaggtagtcagggaaaggggcttttctgatgatttgtcactggcttattcagtcaacaaaccagaccctaagtgcaggttgcaggatgaggagggagccggtcaacctgcaggagcacctgggtgaccagcctgagggttgatggagccatttgtatttcttaggcaatgattaacctggttgagctggtaaatcattcgatagaaccttaccctggaaaatgccgggcttgcaaatggggggccgttggtttcacatctgctgtttcttcattggactttgtcacccatgaggtcaggagccagcagccgagggccgttgggaaattctccttgggcagatagctgccacttttccttgctagccctggagtgctgtacgtgccccaggaaactgtcccatgtaggggattttcatggctgggctctgtgtgtgttgggggcggggggcggaggatattgaagaagcggccctgagtgaaatgccagtggtcctgagaggcggggctgagacctcctctttatttatttgtctttggaaattgtaccattcatgatgaaatcgcccctaaaggacacaggcagcaaggactggcctttgctagacctggtaagctgggcagaccgagcccagagcagggcctgggtgccccagcagggcacagggtgctggctggttcctctgaaggcaactgcgcgttctcttcccatgtggagaaaccaggcaaatgtgtgtgtgcatgcgcgcgtgcatatgccagtgtgtatgtttgtacatgtgtatttgaatgtgtgtgtgcagtgtgctgtgtgtacatgcttgtgcatttgtgtgtgtgtgtatgtgcacacaagcctgtgccgtccaagtgcccatgtgcatatttaaatgcgctcacccgtgtgcgtgggcaaatgtgtgcacatctacatgtgtgtcagaattattgtgcgtgtgcctatgtgatgtgatttcaccccacccctatggctgtaggacgaaggcagtacacactgagcaccctgcccatgccctcggtagcactccttctttccttactgttccacagtggatacagagagacctgaatttaatacccagctttgccagttactcattgcatgatctgaggctggtcatgcaagctctctgagcctcagtcttctcatccgtgaaatgggagaataaggaacagcactggtgtggagtggcattgaaggtcatgggtcataggtgtgtgtgtggctggggcctgccttaggtggcagtcagtgatggcatgccctcccagctttgggaaggtctggccctgtccatggaggtgcaggagggtcgcagggctttagttgcttctttctgctcatgcccccctcccactcttggctgggaaaccttggcagcactgggcaggatggtgttgacaggtcttatcccgtcaaagaatgtctatgtggcttccaccctctgtgctctaggtgtggcctggggtcacatggctgctattgctaggatagaccaggaggacccagtggagctgtttgtgcttctggaatctacctgatcaattagaaactactagaaggctgaagtcaggggctttggtgaccttggcttttgcccactggtgaccacagcactgtcattctgaagtgatgcctggttacagcacatagattctccttacacccaggagaggatgaagaaagtcctaaccccattctgtgccctccccagttccatcacacacaccccagttccatcacacacaccccagttccatcacacacaccccagttccgtcacatgcaccccagttccgtcacatatatcccagttccgtcacacacaccccagtcccgtcacacgcaccccagtcccgtcacacgcaccccagtcccgtcacacgcaccccagttcatcacacgcaccccagtcccgtcacacgcaccccagtcccgtcacacgcaccccagtcccgtcacacgcaccccagttccatcacatatatcccagttccatcacacgcaccccagttccatcacacacaccccagttccatcacatatgtcccagttctatcacacgtaccccagttccatcacacgcaccccagttccatcacacacaccccagtttcatcacacaccccagttccatcacacacacccagagggttctgagtaaccatgggcaaccaaaagccaggaaaatggggggatttcctctgcctcccaactgttttctgattagtcacttctagctaattagcaagtgacaaatgggacaataaagctgaaaatatccattggcttcctggaatcccagccacagacatggcacatgggacctggctgagaagcagaaaaatgaaaaaacatttggggtcctgaggaaggaagcacagaggaccacgtcgggccagccatgtcagtgtgtggctgtaggtggctgcagtgtgtgcctcaaagacacactggggccgtgtgcagtatgtgggagctgtgggaacctgctctgtcttccgttttctctccacactgtctggaagaagtgatttcatctcacagtcatttggtgactaaggcaaacttcccccatccaaggtggaaattgtcacagggccctggggacatcataggggtctgtgtccaaggtggcctctgcttccagaggtggctgaggcccctgttgtggacagttcccctggatgcatgtgggtgacagctcctgctcccatagacagttccccatgcatcctcagatgggtgaggctctgctgctgtgacaaagactccccggtccagggacttgaaacaactttgttcttgctcagtcaccatggacgctgttccccaccggcagtgtgcaggggggccctggctggtggggtccttccacctggtgactctgcagcctcggcggcaggggcagggaggactggggagcccagcgctggcagctgcatcctttggctttaggagggacttgtgtgacatcctctgacatctgactgtccaggcccagttgtgtagcggtggcctggctgcaagggggcagggagttggaatcctccccatacgtggcagtggaaggaagccagaactctgtgctcattggtagttgtctgcctgtctctgacgtcggctcacttgggctgataagggctggctggtggttcccgagggtatcctgtgtgtagtggggatgttcttttcctgtggcctctgtgacatgttccttcaaacccagtggctgaaaaccacacagatcaatcatcttacagtcctggaggtcagaaatccaaaacagatccccctgggctatgttaggtgggctatgttaggatgttttctccagaggttctaggggacagaatctcttcccatgcctttttcagcttctagaggccacctgcattccttggcttcttggccccttcctccatcttcagagccacctgtgtaccatctcccagcctctctctgaccctttgccttcctctttcattgggaccaactcgacaatctgggagaatctcccatctcaaggtccttaatggaaccacatctgcaacgtctcttctgccatgtcagatggcacattcccaggttctggggatcagggcgaagacatagacatctttggagctgctcttgtgcctaccaccaggggccatccttagtgggagaagccaggctacctgccttcctccctccctctctctttctctggctttgttccttcattgctgtggctggggacagagtgcacaagaggaatgagggccctgtcctcatggagctgccagtcctttccaaggggaagactgaccttcagcagagacttccagtgcagggggtttgggagtcccctccctgggggacaggaaagtctcctctaaagacgtgacttgtcagctgctgtctggggattgaggaggagttagggaggtgaggtggggataaatgttgtgaagaccagttgcttagccacgtgggtcccagcacccagggcctgagtctctgcttgtttcagtcccactgtttctcagtcttccctcgttttcttccaccctgactgtggcctgctccgtttcgcagattgctcatccccattcccgcccactgcttttctggaagatgaaggggctggcttcctgcgtcctggcctgggcactggagcaggccatgcccccaggaggcaggcgggacctggctgcagggatgtgggaaataggacccaggaccgtatttgcaaaagcaacaaagttgaaagcaggactgggcaggctgggtcgctgtttgcactgggggaagcgctggcctcagaggtgccttcctcctctcgggccagaaagggtgattgtttcagagtcgtctgatgaagagcatatattccaaacagagcccactgcctgtcccggcgccagcttcgaacaggggaggcaactgtgacgccctgtggctcctttcacccggcagtggggagggtgctcaggccaaggggagagagagagacctctaaacacagcctggagaggaaggctgggcgtgctccgccagcttcacacgcacctctcttggccctgccagatgccatttgtgttttctctttcccgtgccctcgccccttgccaaaagctataggcagcatggccaagattcctctgtggggcaggaaaaagcaaagaaggaggcatgagcttctaattagcaaagatagacaaattgctggtggagggaccaccttcagctttgtgtgcagacacgtggcccccctggcccttttatattacgtgtccacattctttggtggtctaacaccctcctaggcactggagccaccatgcaagcgtttccagtgggctgtgaacagaaaagtaattttccacatcagaatcaaatactcaacaggaaggcgaggctgccctgtggtgggcgggacttggccctctgtactttccatttaaggcatttagaacaacaataattattaaataatcattaagttaattgtcttccttgccaaactcattgagggcggatacccaataatacaatcagtgcctgataaatgtatgttgaggggagtctacctttccatgagaactgagttttatctctgaattaacaaatgccagatgtgcaattagcattcagagaaaatgctctcctcttcaaaaggcactttaacctgttattctctatctgagctcatttaatgcaaggagaagctaaggagcagaaagattcagagaaatatcctgcttcagagagttgggcaggagattcctgtagcatccgttctgctacttctcagaactgtgtgccctggcagacatcaataatcaatcaccactctttcctgttgagcccagaggcagctgcagaaccgttcacaacacacctccaggaggccactaccaggtgcttgagaagtttgcagaatcccagactggcaaatatgggtgtataatcgaattcatgtttacctccagatttctactttctggctcagagctgtcctttcactttctcattttcttcattcaccgctgtcagcaggtgccttttttcctgcagccacttctctggctgtgtgaccctgggcaggcaactttattcttctctgggcctcagttctttgtctgtagaatggagataatcgttatatctggtaagactctgtgggacccaacgaaagcatagagtgcttagcatcgtgtctgctaggaactaacaggccctgaagagatgatggcaactttaaaatatatttgttttcactttaatcttcagcaaattgaagccctggccgcaggtgtcattgggctggaagctcctagggatgccccccagaagggggggtttttccttggtccctggtaagtctgcctcgacacacccctacagtgggaggggcaccagctgtcaccttggtgcctcctctgtgccatcagtcttcccagccacagggaactttcccacacacgcaaggcctcatctcgggtctgcagaatccaacaaagagcaggagggcaaagaaagcctgtcatctcctctcttgcagaaatccacaagcagcatttccgatgttgtcattgttataataagcagcaggcctcatccagggaggggaaacgtgatggtgtggtgctgagatagatacctccagttgcttttcccctgagtgggtcaccatagctctggggaaatcaagaaccccccctagactgtgggagtccccaagtgacatcaggcacagcagaaagccagagaggaatccggacccatgggcaaaacagacagaagaattcatgctctcagcagggaatggggacagtgaaagcacacctgcccaggtaacacaccctacaggatgcacacagactcagtgtgcacaacaaaagggtctaaggcctcattcccagctcagcacatacactgtccgctccctgtccaagagggccttgccatttgggcatttggggcccggagagatctgagatgaccccatttccctaggcggcctggcagtgatgtgaccaagtctgtgaagtcaccatcttcatgggtccccaccagggtatactgtgctccccaaagctaaatcaggaaggagaaacgtccccacctaagcctggggagatctccagcatagatgaaacccctccgggctggttattgccattggagtgtgtctggtctgccctggttgggggagactgattcctgccaagtgatttttctccctgaacctcagtgtcctcatctctaaaatggatccataataatacccacccctgggagagctgtgagcatgagagctaggggtaaaccttggtatacaggaagtgtgcaattaataggagctccattgtgactgttacttttcttagaatttgagtccagtcctggccaaacagaatcaccgtcttctctgtctgaagccattttttccctggaaaatgcagacccagcggtgagctatttgttctctcagagtttctgagtcctgggaactgaggccagagatctcaggagtagaacagtccacttacctggctgcacgtcatctcattttgctgttacggaacctgttctagcccgggtggggtggaaggcagatgttggactggttattatgggggaatgccttctgctgcagaaggaggtggcggcgggcactaggttgcttccaccttttggctacttagagtaatgcttctctgaacacgggtgcgctggtgtcccttttaaaagtccctatttttaattcttctgcatatatagctaggagtaaaattgatggatcacatagtaacttggctgcacccttttatattcgcgccaacaatgcgtgaaggttgtgatttctccacaatgtgccaacgattactattttccgttgttttatcagtggccctcctaatgggcatgaggcagtgtctccagagacagaaggtggaatcctggtaaccacaggtagaaggaaggggagccgggagttggtgttcgatggggacagagtttgagtttgggaagatgagaaagctctggaggccgacagtggcgatggttgcacagcagtgtggatggaccaaatgccactgaaccgtacacttaaatggttaaaatggctaaattggacatcacttatacacacaattgtacatcacgtgtacacacacaaaagcaggtgtcacataggagacacccagtttaagggacattctgtacggtgcctgaatggcgctcctgaaaactgtgcaggtcctcaaggctgaggaaagcgtaaactgtcccagaccagggaggccaaggaggcgcgatgactcaatgtcatgtggtgccctggatgggatccagggacgggaaaaggacacttgggaaaaactggtgaagttcacgcaaagtgtccgggttagttcagcatcagagaccaatgatggtttcttgcttgtgacgaaaatgttccatggtctgaaaggtgtcaacaccaagggaagctgggtgagagggctaccagaatcctctctactgtcttttcagcttttcggtaaatccaaaagtactttcaaatgaaaagtttaatttaaaaatgagaagccacctcccccacgagatcatgaagctccatgaaggccaaggccatgtcaatgccaaatgcatgttggttgaattcactcgtgttggttgaatttactgatgttggttgaatttactgatgttggttgaatttactgatgttggttgaattcactcatgttggttgaattcacttattactgtgtacttaccatcttgttggcagcctcttcgttctttttttctaattgacaaacaatagttgtatgtattacatatttatggagtataatgtgataatttaatatatgtttataatgtggaataattgattaaatcatgctaacaaatccaaaaataaaataaaaataaataaaaatgggaggactaggcagcacagtgagacctcgtttctacagaaaaaatgtttttaattagccaggcatggtggtgcacatctgtggtccccgctactcaggaggccaaggtgggaggatcgcctagttcaaggctacaatgagctatgatgttgctactccactccagcctggttgacagatcaagaacctgtctcaaaaaacaagacaattgtggtgaaatacacataacatcaaattcaccaaatcggaggtgtttttaacatacagttcggtggcattaagtacattcccattgtgcaaccatcactaccctccatcttcagaactcttttcatcttatcagacagagactctgtccctgttaaacactaactccccattcccctccccgagcccctgacacctaccattctatgctctgtctctacgaatttgactgctctaagtacttcttgtaaatgcagtcacgcaatatttatcctttgtggttggcttatttcactaggcgtcatgttcttaagattctttcatattgtagcatgtgtcagaatttctttctcttttatggcaatattccattgtctgtgtatgctgcaccatgcttctccatccgtccgtccatcagaggacacgaggttgcttccacctctcggccgttagagatagtgctgcggtgaatgcaggccgtgcttctccatccctccatcagcagacacgaggctgcttccgcctctcggccgttacagatagtgctgcagtgaacgtaggtttacaggtatcacacacagaccaagcttcccattcttttgggtctgtacctggaaatggaacgtctggatgatacagctcttctccggttaagtttttggggacctgccagattattttccatagtggctgccacattttacatttccactaacagcatgtagagaccagggatactgctcagtgccctgccacacacaggacaccgcagagatgacctagccccaaatgtcaacagtgcccaggtggagacagcctggcttggagtgagcaaggggcagaaggaaagacaggaggcgtggggaggaggcaggccagccaggcaggctgctgggaaagttgtcctgagcacatcttggaatgaacacagctgcggcagctgtgagtatttgctgcttggcaccccaggaagcttttcttggattgtctcatttcagtccccaatgccaggagcttggcataaaatgtgttgagagtggctgcgcacagtaggcccactgttcctcccgcctgcagccatcctgactttgttcccttcagcgtcacctccccaaccccgccaccaggtactttgtcctttgaaagcaaggtgcaaacactggcaggcgagcccagtagataagatgtctgagtaaacacccagccctctccttgtgggatccgcattaccccgtgtttgtgaatgatcggggttacctggcaaccaggcctgggcgcccctcctgccgcccagagccaccaggacttccttcttctgtgtgcggcttccagcttgttggcctccacaggccgggcatgctgggcagaagaagagggtggcgctttttgtttttatttaaaagggaacaccaagcctggctgagcaaaccagacagtttgatatcagaccccgaacatggcctaggtgggcttggggtaagagtgacccccaagagtggggtgaaggtgaacatttattatgacaccagcatcagtggtcacttatttcatgctgggccagcctcatgattcttttgtgcctctttattgaaagcctcttgtgtttctggagctgttctaggtgcaggagatagagcaacgaccacagtagttaaaatctgttttcatattcctaagttcaggtaaggacagagaagataaacatgtaaacagataacagccatgcactgcatagtgacgtggtcggtgtgtgatggtggtcccataagatcataatggagctgaaaaattcctgtcacctactcatgccatagctgtagagatgtcatagtgcaatgcattgctcaggtgttggtggtggtgctggtgtaaacctctcgcactgccagtcgtgcaaaagcacagcacctacagtatgcacagtgcataagacttgatggtaaacaactaagttactggcttgtgcattcgctctactgtacattttattgttattttgtggtatactccttctagttataaaaaaatgagccataaaacagcctcaggcaagtctttcaagaggtatacagagaaaggcattgtggggctgggcgtggtggctcatgcctgtaatcccagcactttgggaggctgaggcaggtagatcatctgaggtcaggagttcgagaccagcccggccaacgtgttgaatcgccatgtctaccaaaaatacaaaaattagcggggcatagtggtgtgcacctgtaatcccagctactcaggagcctgaggaaggagaatcgcttcaactggggaggcagaggttgcaggggccctgtctgcgtcactgcactccagcctgggcgacagagcgagactctgtcttaaaaaaaaaaaaaaagaaaaagaaaaaaagttgtgtgtttttttggttttgttttgttttgtttttgttttgttttgtttttttttttttgagacagagtctcgctccgtcgcccaggctggagtgcagtggcgcaatctcggctcgctgcaagctccgcctcccgggttcacgccattctcctgcctcagcctccccagtagctgggactacaggctcccgccactattcctggctcattttttgtatttttcatagagatggggtttcaccgtgttagccaggatggtcttgatctcctgacctcgtgatccgcccgcctcggcctcccaaagtgctgggattacaggcgtgagccactgcgcccagccagaaaaacaattttttacaaatgtagtgtagcctaagtgtacagtgtttatgaagtctgcagtagtgtacggcaatgtctcaggccttcacattcactcaccgctcactcactcacccacccagaacagcttccagtcctgtaagctccattcatggtaaatgctctgtacaggtaaatcgtttttatcatttatgccatattttcactgtaccttttctgtgtttaaatatgtttaggtacacaaatatttaccactgtgctacagctacctacagtattcaggacaataacattctgtacaggtttgtagcccagccataggtgtgtagtaggccgtataccatgtaggtttgtgtaaatacactctatgatgttcacacaatggcataatcgctgaaaatgcaatttctcagaacctatccccattgttaagagatgcatgacttttttttctttttggagacagtctccgtcacccaggctggagtgccgtggtgcaatcttgcttcactgcaatcttcacctcctgggttcaagcaattctcatgcctcagcctcctaagtagctgggattacaggcacatgccaccacgcttggctactttttgtagtttttatagagacagggtttcaccatgttgaccaggctggtcttgaactcctgacctcaagtgattcactcgccttggcttcccaaagtgctgggattgcaggcgtgagtcagtgtgcctggccatgactatagatcacctaatattttaggtgatcatagatgctttagagaaagagggcagagggatctgaggtgcaaaggacttagggtgtcctttcctgggttcagggacaacattgaacagagctgtgaatcaagggacccagctatgcagacacttagcagatgtgtggtggagggaagggtagggtggaggtaggcacagtatgtgcagagggccctgcagcaggagtgaggctggtcaggtttaagaactaccaggaagccagtgggggctactatagagtgagggggaagagggtggcaggggctggggtatgaaaggtaggaccagcaattacagagggcctcgcagacaattgccccggccttgagttttctgcggagtggagagctttggaaggttttgagcagagggaggataaaatctgactctggctttaaaaagcatccctcagctgctgtatggacagtattctaaacctccagtctagtagccactgggcatgtgtagccattggaatttaaattaattgaagcaataaagttgaaaattcagttcctcagtttcagtaggtacatttcagatgctcagtagccagcccagatacagaacatttccaccatcccagacttcttcttggatgatgtggtctaaatccaggcaagtatgggagttgggatacctgctgggggctgttgtagtaatccagttgagagagaaggctgataaatacctcgggcagaggacatgacagtggtcggactcaggatctatctgctggtaaagagggcaggacacactcgtgggttagatgtaaatgtgcaaggaagggaagtgagggttccatggttgttggacagagccattggaaggccagaaaggtcatttatgagatgaggatgcagccaaccgttgtaagttacattgagtgagctgtggtctgtgccaagtactgagccaaactcggatctcctgggaccctcagcccccattgtgcagcagaacacactgaggctccgcagaggtccatgcctgcccaggcttacccagctcatggtccaaggagccaggattcaaatctgggtcttcttagtcctgacaagggggccctgtttacaaggaatgcctcatcagcattctctcatcccagaaaccactggcaaggtgctggacccttctgccctcaagcaaatccatttggggctaacttgcagtgctggcagtgttggcagatgcccagctgcgggcctcttggaccagggtgatgatccctgggctggggcccatgagagtaggacatgtggcaaaggatggctgccagggtgtcctctcctttgcttcctagccacgcccacgcccatgcctggcggatggccccagatgggtgcattacacatttctcctggggaccttctccatcccatgctgggtggttcactcatctgtccagtgccagatggcacagagccagcaccgaagggctccaagttcatatcacatacccatccagtgagggacgtaaatattttttttcatttttcaaatgtggaaactgaagctcagaagggtacacttacttgctcaaagtcacacagcagccaagtaggagaggcaggatttgaactcagggcttttggaatccaaagcccttgcccttgtctgctgggatctgccgcgtcctcgagctgagtaggatgcagaactgctgagcagagctttctgccgagggttacacagttttgattttagacctcatcatggtgtggggtccagtgggcaggaatctcacgtgccctggcaaggcgctgacccgccagaggaaaaaccatcttgttttgcacaaagcctcccccagctggctggccatggctgctatcatctgccaagagggggctttgtcttccagttcttgaaaaggtgtctacaggcgagccacaacctggctggcacctgatggcagacacagaggaacagtgagaatacagcaaagcctcaagcttgccttgagagggtcatcttggcttggggatcatgggctcataccttggagccagaagtcctgagttcaaatcccagctctgcctctttctgttttgtggactccaggcaagtcacaaactctgcgcgctgctgcggtttccttcctggtaaaatgggaatgatgataatagcaatacttctttccatccaaggtgcggtctatggaccagcagcgtcagcctcacctgggagtttgttagagatgcagcatctggggccacactgacacgtaccgcattatagtctgcatgtttacaaaacccccaggcgatacatgtgcacattaaagctgagacactggtgtggactgagcaaggtggttcgggttccatattgagcatgatgctgttgcatggcaatcggtacgcttcttgcttggcgtgttctcttattatcatgagctgtgcaatcttgggccgtctctcctagactcttagctattattatggggcttcatggtgcagaggtgccctgggagacagatcaatgtctagaaaagcttctgccttttagccctgattctgctgagggagggtcagcactgtcggggccattaatggcaccttggaagagccgccttccattgcagaccacaagctggacacccaaccccatgctgcagcctagctgtctccagcagctggtgcctgggtctggctttcagggcccgtcttcctgggctagaaagagctgcagagcctgagcccagggccagtaggccagccattctcccatttcgtcctctccttctacctagcagttttaggacagattgatatatgtggtctgaaaaagccactggggcaggtaggacagaagcaggtggtgacatcacagtggagcccagattttagttggtcaaatacacctgccaggggagaaaagaatgccgccctcacacaggcaaggaagctgggcacccgggggtggggtgctgagaatagacatttttgcattggggccttcctccatatcacccctacttccaaccccacttaaggtgcctttcttggaggagtctccgatgtctaaaatgtgcccatgctgagctccagggacttgatttaaaagtacatatgtgtctttacgagtgtgtgttatacatgtaatggtctcagagcagaaataaaaccacaaagctattacagaggaatctagtcttccatgtaatgtggctctgagctcctccctggaatcccctagagttgatgtggggggaagaaggaaaataagagaatgagaagaagcaaagctggcctctgccagcagccgggagccaggagttctcaagctcgaggctgcgccgcagtgccagggagcctgttccaagagtgtgctcttgagacaatggggcagtgggtcgggctgctctggattttaaacaagcaagcctgggtgattctgatgctgatgaccctgcagattgcacttctagaaattggggactaggggaagagtcagcaagtcgggcacacaataggtgttcgatgaatatttgatgagtggaggcatgtacgtgggaatgaataaaacatgctcaagctaatggatgagcacacagagaatgaattcgcagaggagaacatgcggggaagaaggcatccttggaatgagtgcatgtgtgcccgggcgactgtatgcaggtgggaggcatgaacctgtggggggtgggcattgcagggcaggaggggatggagcaggggtctccagagggggtttcatgaagaggtagtgctcgggggtgcctggtgaagggctaagacccttcaagcggggccttaagacattttagctgatggcaggctcagtttagggagtgggggaatggcatggtaaccatggcattacagaaagccctccttcggccaagggatgccccagccccaaagacagggcagtatgtgaacttcagcccaagatctgggcccagatggataggaggcttgtaccatggcccaccttccaaaggaagatttgccccactgggtggcagtgggctttctccaagaagaggagcctctctccctgttccagatgcagatcccagcagcccaactccaggagttgttggcaagcaggtgggcaggggccagagcctgcggcaccttcatccctgctcctctctgcactccatcctcctgctcccctcctggtaacacagggccgccagcttcccctggtgcagactgcagctcagcattgccagggagaccatctgcccttctcactccagtcttcacatcccccagaaggaacccatatcggtgggctcaggcagatgctgacttctggactggtcaactgtggctgccaggtggggtcctagtacacacatggcagcctcctgtggtaaccgtggcatcctcatggcagcggggcaggggagattcagaggggcagggagtgacacaaagacagcggctgtctgccacctgccccctacccaggaggggtttgactcattcgtgctgtcattcaacacacactgattggctttcctgtctgcctccttctggggcacggcgccgcctccttcaggatgtgccgactctcacccagcttttcccagccctgtgttgggctggcgcttggggagcgggcacagatgtcacggggggacatgcccctgcgccctccttcacctttcaggaccagagccagagagtttcccgaacactcatagccagcccggagactccaggcgagaaactcgggaggccgaggcaaatagttggttctttgaggctgaaattgggcagcgggggacctgggagacgttgactgtcgtgtgtttggacaagcgaggcttctgccactctgtctcggacagtccaggggagacagaggtgcttcagattggaggctgccctctcctcaagaaggagggtgcgccggtgtggctggatgagttgtggcttccagataaaattatgtgcttggggtttagtggacttaggccttattcatgcttctgtgtttgctcagcctaccaggccccgtacctggtctcccagcctcctggggacacatcgggttccttgctgttctttcagacagtgaaggagccttcctccctcactgctgctgttccttccttcctgtctgctctttctcaggcaggtcctgctcatggtgcccacccatgctacactgggtgaggaggtcatggagctggagccacgcacaactggattttggtaccacagctttgctgtgtgactctgggtatattactagatctctgtttcttcatattcaaggaggccttcctaggttgcctgcttaccaggtcttggcaggggtctaatgcattcattcctgcttctcctaggacccaatgattctactcccaattctgttcccaagagaactgagtgcttctgtctactaacagacataaacaagaatattcagagcagccttagtcatagtagcctccaactagaaacaacccaagtatccatcaacagtggaacagataaaccaattgtggcatagttatacaatggagtactacacagcaatgaaaaataaacaccatggatgaatctcacagatattatgttgaacaaaataaagtaaaatgagtacatagtgtattattccagttataggaagttcaaggtcagacaaaactaccctgtagtgatagaggttggaatgatggttacttcttgagggaattgccaagaagggacatgagagagccttctagggtgctgggtggtggtcacatgagtgtgagcatttgtcaggctgtatgcttgccatcagtatgtatgagcgacttctcgtacctcctgcacccagagacaagcatccttcagccatacagtttctgtggatgctcactgggtcttcggagccatgtgtccggctgggaggaattcccacatcgaagtccgaggctttgccgcctggcggaaaccccgcaccacgggagcttgtgctgctctcagggcagctgcagacttccctgaagggacttgcttgtcctagaagcatgtcatgcagtgagacaccgctgctacagggcggaatccacttctttccattcttggatgtggcatccgtggcaggtgttgggagggtggcctggccacatcctcaccttccccgggcccaggagctccaagtcaggcagtatttgggcctcaggaaaacagtgtggcctggagggaggcagactcactttgggaattcccttgctgcacaactttgggtaagggatgccacgtctctgggcctcagtttccacttcacaccttcagggatggtgtgaggatcacccaagagaccacatgggaagtgtcggccccttgcgtggctagaagctaggctgaaagtccctttccctctcacagtatgccacgccgccctcaggaccctcctgctctgcctctccatgcgctgctcctctgctgtgtcgtctgcacagaactgaccaccttctaaagggcatttgccttatttcgtccccgcttcttgtcacctccccgaagcgcagagattcttgtttattctgttcactgctgtatatctgcagccctgggcacgtagtaggtgcttgataaatagttgttgacttgacttgttagcagctggtagaagcttcccctaatgtttcattctccaggctttattttgagtgaagttgaggccagaaggcctcagtatcctcttccagggatgctgggaactgtagactggatgaccgtgagcttttcagtgtgtgtgtgtgtgtttttttttttttttttttttgaagctggaagaaactgtacagaaaagaggcccattttgcagatatggagaccaaggtccagagggaccagggccttgccttctagggcacctttgatgggagaatccgtaggcttgatgttgaggtccttcggtttgtctttctgccttttcattgcaactccagggggagagggaccctctggcctcacccttggctctgacctcagtgcggtcagtaaagtctgcctttccctctaactttcacctctttctccccactgcctacgtgcctgccctctgcccactgaaagtgggagcatcagaagggagctgtgcccccaacccccatgtgagggacagatcagcaaaagcctcaaagtccgtgggccgtgtgtctcccatctcattgtggctggggccccgggcaagggcaccgtgcctcgggagtgagtcactctctctctgtgccaggcaggagctccagggactaggggtgacccaagagtgaaggcctgatggggaggaggacccggcatgacagcccttggcttgctgggggaggagagtggaaacttttacatttgtttctcgctttcaacccagtaagtaggaatcagcctaacagatcagcaagagcctcaaaccttggctcgttctgttcaagaagacagaaaccacaaaggcaaggagagctggagttggctccataacaaagtgacccttgagcgtggaaaagcagaccagcaaccagcctcgccataaaccagtctgaaaggcgagtgggtgacctgggaaaacgcacttgtggcccagttgacaattgaagggttaaatgaccttaataagccgaagtagctgtgaatcagtgagaaactgtgactgcctcaaggggaaaaggtgcaaagaacaaaagagaaatacagtgaaaaactgtcagcttctcaaaaatcaaagagatgtaaattagaacagggggtgcagtttttcacctggagaactcgcagaggtttaaataagatcgtacattttacgaagaaggcatctgtagcacccttatgaatgctttcccttctgggtgcataatcgccctcctctaaattggatgctcttggggtgacctcacctggttctctctccccatcaccctgtatcccttgagaatatctgtagtgacagctcctgagcacctgttgtgtatcatgcattctatacatactgtctcattctgggggttccattgttccacttcgcagaggcaaaaactgaggcgcagaatgatgaaatgacttcggcgaggtaccccagtaggtaatggagctggcatctgaacctagggtaaccagcctcaagcccgtgctctccttttttgcttattttccaccactgtttggtccctggctctcccagagggacatggcactggctgggcctcaggggatcctggcttctcttgaattcagtgttaccttccagctgccgagacctgcaggaactgattccacaggacagtcctgccaaggaggcaagcgggccagagagaggcggcagcaactttctgacaggtgccggggaagtcccgatttgcaatgcttgcccgtttctactgtgtaaatacttacactatggccaaagtgagatgcttaaatgcagagtttggaaaagatgggcacagttggcttctgggagctggaaagagctggcttagccatagcttcaccactgcccaggtgggtgactttgacctggtgtcaacctctctgagactcggttttctcatctgtaaaatgggagcagtatttgctgcatagggtggttgattgtgaggattaaatgagtgaatgtgtgtctagcgcctgtactgtggtaggtgctgtctaagcgttcgttatgagtgcacttaactttcattcattcattcattcattcattcattcagctttcactaacttcttcagccctccagcatctgtctgtcaaagccaactgtccaccaggcctgtgctagaatcttccttttccctctctcccttggagtatcaatgggggaagggggatggcctcaccccttctgcagacgggcttgtctggatccttgtttgctgtgatttgagccaaggacagctgtagtttttttgtgttttttagaaatttccacttgtgtggctgcctcccttggtgtagccacagagggggtggagaaggcgcatcctctgggggtcgtggaccttccaaaagccaatcctagcaccccgtgttgtcagtttagaggcagtggcctgggaactggcagtagacttccgggatggctgtcgtggggccagtgctgtgcgggggaagcacactggcggtgaacctggcttggctgcttctcagtggactgccttgggcaaaccactgctccgttctgagcctcggtgtatttttttagtctataaaatgtgctaacaatggcctcctggcaggtggtgggaccgctagttttgaagaagccgaggtggaaacgccagggagccccaccctacccctgtgggacattgagagtctccagactgatccccttcttcctggaggccccagcaggtccctgggaggagaaccagggatggcctgaggaaaggctctccctggcaaaaacgcggtcctgtttgaacttggttctctgttaacatgtgctgaaaggagacgccggtgctctgtctctagcgatccctggttccaggtccccattctgttcccaatccaagcctttgggtcgttagtcctccaccaaggccaccagtgatcaggacctctgtttccagagccctcctgtgtcccaggtgcgtgactgggacaagtctgagaaatgatcacagcccagaggagcctgcggacacgtgatgatgaaatgtcccatggggtcgtgaaacagaaaagggacattagagaaaaaaactgaggaactctgaatcaactgtggactttagcaataaaatgttttaatattatttcattagttgtaacaaattcaccacactaatgtcagatgtaaatagtcggaaaatgaggtgtgggtatgcgtatgggaactctaggtactaactcagcagtttttctgtaaatctgaagctattctcaaaaataaaatctgttaaagaaaaaaagacaggcgggtgcagtgactcatgcctacaatcccagcatttgggaggctcaggtgggaggattgcttgaggccaggagtttgagaccagcttgggcaacatagtgagaccctgtctctagcaaaactaaaaaattagctagatgcagtggtgtgtgcctatagttccagttactcaggaggctgaggtgagagatcttttgagcccaggaatttgaggctgcagcgagcagggatcacgtcactgcattccagcctggataatagagtgagaccctatgtcatttaggaaagagcccagcgcagtggctcacatctgtaatctcagcattttgggaggcccagatgggagcccaggagtttgagaccagtttgggcaacatagtgagatctcatctctaccaaaaaaaaaaaaaaaaaaaaaaaattaagaaaagaaaagaaaaaaaaggccttccaaagagttgcaggctcacaggggatcttggtacagacgagcaagcggtcccttccttggtgtgtgtaggacatggcttagtgagcacgtcgtgcaccttgcgtgtgtcccattcagcaccatggctgctcataccctgcctcgaccgtgcgcgggagccctgcttccctggctggaagcctctcccttgatgcccaggagaaatagcctcttgcactaacaagggtggatctgtgcttaaattacctcttacctggttcatcccaactctcttccagccctttcctctgcccccacccagctgccctcagccttcagcctcactggaggaagggtgtctcggaagagttgcatcatgagacccttggtggagtcgctcaccaggacggccttggccccgaccctggcaccagcccagggtgactttgatgtcgtgttctggcgcgtccttgggcccatttccctcctgtctcccgggggctcttttgcatgttcttcccaaggcttcagagaccttcagctccgcgtctgaagcagccatctctttcttggatctcaagagtggtgatttctggcaactgcctcagactccatttctcatctctgtctacaaaactagcctggagttgggctgtcgggttggcctggacatcctctgagcagcgattggcccttgccctgtttctgtgaatgaacgcggtcgctcttggaaagagcccccaccaccttgcagatgtgctggggtagggtgggggcgtgcgaggttggattacatgagactttgggttctttcctgcagtcattcctaagcggtacttctctgcatctggcctttaacagtgagtggacggggccagtgttcttggagcacctactgtgtgcttgctctgttagttctttgtttccttccctgacgggagttaggccttgccacccttatgttacagacggggagactggggctctgagaagcgacttccccagggtgcccggcccgcacatggtcgagcgggggtctcaaatcccgttgagtcttacttcaagtccaggctccttgatcgctggccctgcttgccctggtggcccacagtcccagagtcagtggcgccaaggtccctcaggctggttgtgaaatcagtttgagtgcagaatgacggcggttcacatcgagcttggtgcccaccctgctagcctgcctgggacttccccagcattagcaccagcatcagtcctgcctcccaggaaccccctccgtctcagacacacctccatgattggtccctgcctcacatcccagtttcttcaaatatcagcaagtttcacactgagagagaaatgtagataaccaataataaaatgaaatgacctctggtccctattgtcagagccataatagtgacattacaaaaatgcacctttagaccaggtgcagtagctcatgcctgtaatcccagcacttcgggaggccgaggcaggtggaacacttgagatcaggagttggagaccaggctggccaacacggtgaaaccccgtctctactaaaaatacaaacgttagccgggcgtggtggcgggcacctgtaataccaactgttcgggagggtgagtcaagagaattgcttgaacctgggaggtggaggttgcagtgagccgagatcgcgtcactgcactccagcctggacaacagagctagactccatctcaaaaaataaaaaaaaaaaaaaggcatgttttccctaataggagctgtcagaatgtgaagtgaagcagtagtgtgggaacccttttaataaggaaaggtataccctgctattcctcatttaaggttttggaaagaagtggagaggaattccacctttggcctgggatgcaggagactgaggacatcgaagctcatatttgatggttaaaaagtgggtgtttgtgttgttttaaaaataagtacaatatatctgttacttgttgaaaatcgctttgtgggttcggggccctagggttgggggagggggaggtctagccagcaggacatcacccatagcatcagggtgttgctgagagaagggttttttaaacctcagtctcctcatctgtaaaatgggccttgttgtcattcctacctccctgggtggcagtgtaatgtgtaacgtgtatttgtgccagttaagtgagttaatgtgcttaacgcatgcgtggcccagaggcagttgttcaagaatgtgagctgtcagtgtcctgactcctcttgagcagtgagtgtgtctcagaaataagacatgcttcgtttcacctaccctccattttctaccaacttttgggggcgccatttaacacccaagcctaggcttgacccctggagcctttacctggactgcaatctagtatagtagtcactagccacgtgtgcctgttctatgctaaattaaacttaagaattcagatccttggtcacactagccacattgtgagtgctcagtagccacctgtggccagtgcagatacagaacatttccatcatcgtagtacgttctgttgggccgcgctagtctggagggatgcctggctgagggcccagggagcccacctgccctacttccctcacctgcaggctgtgaatctgataaccccacggccccctcctccaactgcttggccaccctgccacctctcagcccttctggggctgcctgtagcctggcaccaacaacttcacagccccaggagtcctgctggctggcaggaggacatggcaggggtgccaggcttggcaagtggcactgttttctcagcaggaccgggcgaagcccgagttctcagctgggtacagccgtgccccaggttcagggcataatccttcagggaaaggtggagatttggcaaaagctggaaggctgttggaggctttactaatggacaaattggaaaattcagtcactaaaaacagtgacggaaaggttgtaggtgattctgtaagaaagagccttcgagtatggcctgaaatacagttcctcacccttgctcagttttttcttccacttctgagtaggtttgatgtcccggatgctgggctggtgctggggatacagtggtggcctctgtggacaggtcaccatccctgttctcgggaggctcacaggccagtaggggaaacaggcacatgaagatgcagctcacacttcagctgactgtcagagcagaccacactgcaagatcacgtgggcaaggacaggattgtcccctgcgtatcctaagcccctccacagtagctgctcacgaaatggttgctggaagagcatttgcatagggcattctcttgttctgagctcttgctcattcctacctcatttcatcctgtaatggggatggatactcattgctcccatttaaggacacaggtgtgccctgctgcttcctgaacctgctcaaggagagttgcctcgtaatataataactgagtaactgagcacttaacttcatgccagccatatgctaaatgcattacccagattatctcattcaaccttcacaacaaatgtacaaaagacctattattatccccagtttatggaggaggaaactgaggcacaggagaagttaggcacttgggcctgagtcatgcagtgttggaatggggatgcgtcgggcctcctctgggctttaccaggctcagaacattcctagaagtggacgtggactgaattggccccttcctctctctccccacaccatcagtggagacgactacaaagctgtcactggccctccttttctagcaggctcagagcaggggtgacacatggctacagggagcagaaaacattgtcccgagtcgagtccgtagatcatctagagcagtgatccaggccccagtaagggaggtcccatacagaggctgacttcatccattagtgcagagtaaacacaagggccctggaggctggagccaacacccccaggacaactccctgctcccttttgtattgtcacctccttggttcctctggggatgctccagttactgccaacgggacagcagtgacattgtagcccaagacaccagcatgtaaacgttgcgtgtttgggaggtgtgtgctgggccctgaagagctctgagttcaggtcctgcctctggtccttcctggccacgtgagtctgatgatgtgtgtgagtaggggtcagtgatggtctgtaagggcagagaactttttctgacacaggttctggctctaagtgtggctattttaattccttgacaaacacttggatacatttagtagactggctaaactgtaagacttttcaaaataagagtagttcttataaatgcttacttagtgcctggttgcgctaagcagtcactaggtattatctcatctaattcctgtaacaaccctctagggtagatactagcatttatcaccagatctgagatatcttgtaagatactccattttcttgcatacctctaagcaagaaaagaatgcgtctaggcgcagtggctcactcctgtaaacccagcactttgggaggctgaggcgggtggatcacctgaggtcaggagttcgagactaccctggccaacatggtgaaaccccgtctctactaaaaatacaaaaattatccaggtgtgatggtgcacacctgtaatcctagctactcgggaggctgatggaggagaatcgcttgaacccgggaggcaggggttgcagtgagctgagatcacgtcactgaactccagtctgggtgacagagcaagactctgtctcaaaaaacggggaaaaacaaacaaacaaacaaaaaacagaaaagaaaagaatgtgcccagagacttattatcacatcagttttaagggaggttcagttgtacgtctctgaattaatgaaacgcagtattatgtccattttacaatgaggagatcaaggcacagagaggtccagtaggttgctcagggatacgtagccaatgagaggcagagccaggacttgaatgtcagcaccccgttactagagcgtggtgtattacccactgctgtgtacttgctgcagaatgatgtctcctaagcctagtgcagaacagtgctgaagaacacagggtctagagttaggcagatccaggtgtgagtcccactcccatgactttctagctgtgtagctttgagatgtcccagtacctctctaagccttggtgttctcatctgtaaaatggaagtgtcagagcaggtattaaatttggtgaagcttgagaagtacttggtcgtagtggaggctgctctgatcacatcatcaccaccaccacaatcaacagcagcatcactgtcactgtcatcatcaccaccactattagcatcaccaccaacatccccattaccactacattattatcactatcaccatcaccatcatcaccatcataaccatcacctttatcaccaccatcatccccattaccactacattattatcactatcaccatcaccaccatcataactatcaccttcatcaccaccatcatccccattaccactacattattatcactatcaccatcaccatcatcaccatcataaccatcacctttatcaccaccatcatccccattaccactacattattatcactatcaccatcaccaccatcatcaccatcaccttcatcaccaccatcatccccattaccactacattattatcactatcaccatcaccatcatcaccatcaccaccatcataaccatcaccttcatcaccaccatcatccccattaccactacattattatcactatcaccatcaccatcataaccatcaccttcatcaccaccatcatccccattaccactatattattatcactatcaccatcatcaccatcaccttcatcaccaccatcatccccattacaactatattattatcactatcaccatcatcaccatcaccttcatcaccaccatcatccccattaccactacattattatcactatcaccatcaccaccatcatcaccatcaccttcatcaccaccatcatccccattaccactacattattatcactatcaccatcaccatcatcaccatcaccttcatcatcaccgtcatccccattaccactacgctattatcactatcaccatcaccatcatcaccatcaccttcatcatcaccgtcatccccattaccactacgctattatcactgtcaccatcaccatcatcaccatcaccttcatcatcaccatcatccccattaccactacgctattatcactgtcaccatcaccatcatcaccatcaccttcatcaccaccatcatccccattaccactacattattatcactatcaccatcaccatcatcaccatcaccttcatcaccaccatcatccccattaccactactttattatcactatcaccatcaccatcatcaccatcaccttcatcaccaccatcatcccaattaccactacattattatcactatcaccatcaccatcatcaccatcaccaccatcataaccatcatccccattaccactacattattatcactgtcaccatcaccatcatcaccaccatcataaccatcaccttcatcaccaccatcatcttcgtcaccactgttacagcatcaccactatcaccatcgtcatcatttaactaaaagtgagagacactgcatataaggtctctttcctgctcttcctggggtctttgtcataaagagtacagagtcccttaatctctccctggtcaatggcagtcccagccctgagctatgtgagtgctgggtcttgttactttgaattgtatacctgagcaaggggaagaacacagagagagttctccagatgttttgtgtctccctctctccttccttctccaaaaacgatctcatctcggagctcacattggagagagctgtccttgtgaatttccccaccccttcctctggtcccttcagtccataaagtatgaaatctccatgccatgggctggtgtgtaggatgttcttcccagccagttggataaagacattttggttttttgcacgtgggagacatcacaaaagactgtgcatacatcctctgtgtccctctctggggaccatggcctggaagcagccaacacctgctcccttcctgcactggcgtcggaaaagttccatggcagataagcccgtgccattgcagggaagccttcactccaaagccacttgctgccccggagacctggcctgcgaggtccaaggttgtgccatctgaccccagatgcttcttctcctttctgtgctggccagtgggagacagcagagggaacactggactaagagtcaggagacacagttccagatctagctcagcttcttcagctccagaaagcaatttgcctctcctgagtctgtttttcttccatagaatctcggattcagataagaattccagttgacctagggcaagcaccctcgcctctctgtgcctcagtttcccctgcagggacatggggatggcacccccctgcctcctagggctattgcagggatgataaggggttacttcttaacaatgaggaggaagatgaaggtgaagggtggtggcggtccttgcaagacagaggccagcagctggtcctcctggggcctccatggggcagctctcaggtgtggaaggcattcacctttgtccctctgactggtactctttggccctagctctgctctcttgagccaccacaaatccagccccttcctctgtgccccaaaacagccctccagacctcggaagccagtttctaactggacagcaatcctgccccttagtgtcatgttcaccttgagcctccttcttgaaggaaaccagcagaaccctgccaggccctttcttggttgtctcactgggaagagggaaaatgtggacttggagagattgtccctgaaccatagcaggtgtggaagaggtagagggggcatggcccagccctgctcccccctgaaggcaacacctcccgctgagtgtcacctgccttctgttttaagggactctgggcaaagatttcatgtaaaaaaagagttctgccacttaaaaaaaaatggatcacgaggtcaggagatcgagaccatcctggctaacatggtgaaaccccgtctctactgaaaaatacaaaaaaattagctgggcgtggtggcggacgcctgtagtcccagttactcgggaggctgaggccggagaatggcgtgaacccgggaggcggagcttgcagtgagccgagatcgcaccactgcactccagcccgcctgggcgacagtgcgagactccgtctcaaaaaaagaaattaaaaaaaaaatgatatgacaggtttaaaaagtttgaagctaggataactgtggctcaacttgtctttctgaagaacggatatttccagtagaatggaaccagtgtcttggggctcccaagagttcattctccccttaagatggaggcaggggtttcctaacctgcttagctgccttgacaccctccctcagctcccattcctaatctccagctttacagcagctgtgatgtagggccttgagggcagggccgtgatcagacccctttaggggacagacaagaatcagagaagcgaggtgccctatgtctcccggctctggagcctgtttgtgacatggtgagctacacgctgggcactaagctaaggtatttttgtctttctaattgagataaattcacctcatatgaaattgcccacttaatttattttgggtttgttttctttctcttttctttctttttttaatttttttatttttgaaatggagtctcactctgtcacccaggctggagtgcagtggcgtgatctcggctcactgcaacctctgcatcctgggttcaagcaattcttgtgcctcagcctcccaagtagctgggactatatagatgcctgccaccacacccagctaatttttgcatttttagtagagacagggttttgccatgttggccaggctggtctcgaactcctgacctcaagtgatccacccgtcttcgcctcccaaactgctgggattacaggcgtgagccactgctcctggttgcagtgagccgaaatcatgccactgcactccagcctgggcaacagagcgagactctgtctcaaaaacaaacaaacaagagcatagttcagcggcctttagcaaattcgcgatgttgtgtaactgccacttctatctaattccgaaacctcttctccaccccagcacgaaatctcgtgcccattagcagtcattccccattcccctctcttccagccccctgacagccatcaatttctgtctttttgggctttcctcttctggacttttcatagcagtacaatcacacagtacatggtctttttccactggcttctttccctcagcgtcatgttgtcagggttcttccgtgttgcagcatgtgtcagcactgccttccttttgatggcagaatgatactccattgtctgtatgtatcatttttctttcttatccattcatctgttgatggacgtttgtgttgttttcacctttttggctgtcgtgaataagcggccgtgagcattcttgtacaagtgtagtcatgcattgtttcacgatggggatacgttccgggaagcgcgtagttaggtgatttagtcactgagcgaacatcctggagtgtgctcacagaagcctcgatggtgtagcctgcctcacacctgggctgtgaggtgcggcttattgttcctaggccacaaacctgtacaacaggttactctactgaatactggtggcagttgtaacatagtggtaagtatttgtgtgtctaagcatatctaaacatagaaaaggcacagtaaaaatatggaatcataatcttatggaaccgcagtcataaatgtggtccatcgtgaccagaacgttgttatgcagtgcttggctgtatttgtttgagtccatgttttcagttctttggggtattcacctagaaggggaatagccgagcttggcattttaggaatagtgctatccttattcctcaccataacaccctgaggttgctacagagggaaaaccgaggcacagggcaagggaaccacttcctcacgcagacagctctggggtggcagagctggggttgggacccagggagcctgatccccagaaccctttagtccctgctcttttccttctctgcagaggggccttgtattaatcagttcttaccttgctctaaagaaatacctgagactgggtaattttaagaaaggaggtttaatgggctcacggttctgcaggctgtgcagaaagcatggcagcatcagcttctggggaggcctcaggtggaaggcaaaggaggagccagcacatcacatggcttgagcaggacgaagagagctggcggggagaggtgccacacactttaaaccaccagatctcatgagaactcactatcacgccaacaataccaagagggatggtattaaatcctgagaaactgcccccatgatccaatcacctcccacaggccccttctccaacattggggattataattgaacatgagtctggggtggggacacagacccaaaccatgtcaagcctcttccccaaatgttcagcccagtgcctccaggaacccctccttggaatattttttttgccaacttgccagggtgtccccagtctccttgagcgtgacagggccaaggcagtgcttctgaaagccacttatcagactgagcttgagaagggatgtgtggggactgggaagggtcctcaaaggcctcccctaaagggtagcaagtggtttttcattgctccctggagtccagtgggctgggttttcagttgtaaggacctctgagctttgagtcatctgtgcaccttgttgatggtaaacggaggaacaccctgcttattcagagaccactttccagcaaacactccgaacccagcccagaatccaggtagagaagtgtaccaaagtcacggtggctgccacactctaactctttggttgcattcccagcagggcctcgctcccatgcagggcacagtcctgactagtgtattgcttgggtttccaagaccatgaaactaaaagcagcaaatcaggatgaagcaagagggaacgctttcatgaacggcgagcggaatgcccaacagcacaaagtcggcgggggtaaaacgaaaatgacagaaagaaaatgaagataaagagtgcacggcagttgggggacaccattcgggggccagcagctctccactgcttcaggagctcctgacggtggcagtgtggggtagcagatgctccaagggacaattgcatcagcaagaaagggcaaaggctactccctgccatctgcttaaagcgaggaaagaaggagtgtttctatctaaaattatttaaatttctctaaagggccttggcactcagagggtaagctctggctggcattgcctctgaccttggccgtctgatcaggcagtgaaagaaggaattgttcctggggttgcaagggagttgctgccaacatctggcctgcctggcccctttgtctccctattgacggcgacagcattgggcaagtcctgggcctcatgtctgtgcgaatgtccccaccctgtcaccggcacttccccccggggtcggggctccgggcctctcatacagctgtgggcctgatggtagaaaaggaggctctgttctttaaccctgaatgggatcggccactgatctattcttgtcacttgttgagcaactgttctaggctaaatctgaattctttctcagttagtgcccgaatttgctttttaaaaataagtcattgggaatacttgaccctgggcagagagcgggaccagcactcaatgaaacttgtcaatagagtttctcacggccgggtcacagacgtggagggagtgactgagtcccaagagaagacccactgtctcactgtgtttcctctcactgtcagccccaaccgaggcttattgggggtactttgtttctcctttggacctaaagtcctctgtctgtcgttgcagaggcacttctagatacccctttcccaagtggtttctgggaaagacgagagcatctgaaagccttatggaggctactgaatacaaggccaagggggctggatttttctctgtaggcaaatcagggatattcaaagtcactgagcagaggaacaacacatttgagttgtgttttgggaagaaaactctggcgacagtgttttgggtagagagggaatcgttggaagcaggaaataaagattggaagcctttggaatattccagaagaaaaataagaggaggcagaggtaggatagagggcaagggaaggtgtggaggaattgaagggcaagaagcagctggctctgaccctggtgactcactagattcaagggctgggagcgccgaatccaagggagaagtggagttggagtgtggccgagcagtaggcgtggttgccacaagccaggcctgggaagacggcccctagcgcccaccagcaccaggtggtgggttcagcttgcattgccatcactggagtgtaagccccctactagaaggaaaactccttggaggcaaggagctctttctgttttgttgaacaatgtgtccgtaacacctagaacatgctggaagtacttcgatgtcctccagcaagcactccgtaaatatttgatgaatgaataaactgtgagtctgaagcgtaggaaggagactcttaatccagtttttaggttgtttgtttcaagctgagtgtaaggccatgtttgtatatgtgttttatgtgtgtatatatgtatgtaagtgtaaaatcatccttctttttgtcagaatgaccctgtttttacctcgagtggtcagagtagtctgtgagaatggctgaaaccattggtctgttaagagtgtgcccgtgtagatcagctgcagtcccacataatgacaggagccttggttcatccaactaggaagactgaagctcatggaaataaacatcaaactagcccggcgccgtccatcatccgaattatcaacacatcgtgagatgccaggaaatgactttctgttcttgaattggcctctggaggaatcccctgagaccctagtacttcattctccctctgtccagtaaaggaacgcttctgcaaggaaggggttcatgtggctgtggatgaagcctgctgggcctggatgcctccatgagtcaactcccccaactgttcagacccctgtgaagggagagcagaggctttgaaatggccattttaatatcacccgtaagtttggaaaattcttagaattcattgcattcgtgtggaacttctttttcattgaggtgaaattcacataatgtaaaaaccacatgtaaatgtacagttcggccaggcatggtggctcacgcctgtaatcccagcactttgggaggctgaggtgggcagatcacttgagttcaggtgtttgagaccagcctggccaatatggcaaaaccctgtctctactagaaatacaaaaattagccaggcatggtggtgggcacctgtaatcccagctactcaggaggctgaggcaggagaattgtttgaactcaggagttgaggttgcagtgagccgagattgtgccattgtactccagcctgggcaaaagagtaagactctgtctcaaaaaataataataataaatgtaccatttggtggcatttagtacatttataatgtgcaatcactaccacttctatctagttccacaatattctcatcacctcaaaaggaaacccgtgcccatcagcagtcagccctgctcccctcctgccaggccatgacagccgtctgatttctgtcctgtggatttgcctattctggacatttcatatacgtggatcaattccattctgaaaccctttgtatcaggcttctttgatttaggatcacattttcaaggttcatccatgtcgtagcgtgtgtcagtacaaatttaacggcagacaccgcatggcacagtaccttttggccagtccacttccctggaccttagaaattcctttgcatctgctggaggattgggctggagaagaaccccacctgtcctgaccctgcagccccaaatgcccttccatgtccctggcccagcaaaatcctcctcacttctcaagattcggctgtgagcagagttagtggctgtcttcctctttactgctctgtaagagttgctgcccctgtcgtagcacctgtctcaccagcactgatcacctcccccattctccatgagctcctggagcatggtgcccagggcgctgccggggaaggcctgttagtgaacgtgtggtccagggaacaaacgcatggcattctcacagccggactccattgctccctctagcttcagggattggtcatgttgtcatctgtttgtgctcctatcttttttttttccagaaaggatttggggtgggggtgggtctaaacagctacttgtagagacagccccgccccacacctaccttctgtcatcaggaccccacttaccaggctctttcagagatgggattttgggccctattgatgggatagtgaaatggacaaagcaactttactactattttgataacacagtttactgtagtagaggcgtgatgcatctcttcttgcattggaggtggtaatttgtgggtgctattatcatcgaaacagcgatagtagaaagagatagtcgttcactgcctacttgtttgtagacagtagcaacagtgatccttgggggcccaagagtccctcttcacaaggcctgttcacatacatttacctagtgtctcccgtactaggagaattaaatcccagtaagccctcacattcctcagtgatccggtgtaactccaagcactgtagcctgccacgcaaggctctctgtaatcgagatttaatcagtttttatgactcacctccttcaacttctctctctctgcccaataaactcctattcatccttcaaagcccaactcaaacatcgcatactctctgaagtattcgtcccactttccctcgggctcctctgcctccacacctgcacacatacacatggaattctactaatgtgtagacatctgactccccactcaactgtggagtccttaaggaaggggttctggactatgtcacacagatgttagacaaatgaaccgagggggcatttgcatgggtgcttaaagtgaggtaaaggagagaagaaagtagagaactcaaagaggagagctcgctggattcaaatctggggtgttccggaattctaggtattcacctaagtctgttgggacccatgagctgttttcccaatttagaaaagtaaagaacaggctacatgagatgaaatctgtgtggttggtttttgtttttgatgcagtgtgtgcagtgtgattccctaatagcagttaactggtattgatttgaaacagaaatgcagaagggcagggagtcagaggtgtttatacaggagaaagggaacctgcatgactcattaccacggggcagggtctaggggagcgcactggacactggagccagctttacagctggggtccactctgatggggccgcccattcctgggctgtaccagcgattaaacatttgaaacaccacctctgctcattatatgatgagtatgtttggtaggcagaattttgaaaggtggagtgctgtgggtggaatcgatgaggcggtcagtctgtgtctgtgccatatgtactcgggggcctgtgacccagtggggggccggtttcacctctgttcagccagagccaccacaaagtccttgcttccccagctgctgcacagattgcgcagatcatcatccccatcacggtaaagctttgaggtgggtgttcttctcattcccattttaccaatgaaaaaaccaaaggtgctagagatgaagtggccgccaaaggccacccaatgggtgagctacagcgctggagtgggaatctcagccgtctctgctccatcttccagaactttcctctactgctcctgacttcctgaagtgaccaaacctgtctctccctcctcccctgacttcagggagcagatttttcatggtgattttagagagcacacgttgatcccctcctgagggtgagagcctcagatgttttgggcctgactgtccagcctcctggagaaaggtggccaggtccgtgtgtggacagccagtgtgcgggtgcatgagtcaagctcccttgtcacatatcctggaaaccctccatggaagcctgcagcccccaggccagcgctgaggcaggaacggtcagggatttcccacttgaaacacaccgtctaaggctgccggctcttgcttccccaggaactactgcatttgtcttgatattataccctgcctgcctccaagaggaccgaggcttttcagagctgagacactgtgtggaaggaggcaattaggatcaaacagaacgagaccctccggatccccagggctgggccgatcaccccaagctttgtttggccgtctcggagctctctgttgaggtagcagaaagggaaagacggcttgcatagtttttgttttttggccagaaaaagtacccaagtctgtctttcaaagtagatgcctttcttctctctctctttttccccagtcccagattaaacctctttttaagagatttgggggagacttgtcccttccagttgattctctgaaggcagaagttttctctttaaatctggagccacgcttgtcaggtgtggtcccggtgtgccaccgtccattgacctcgtttacgggcagggtgctgtaccttgggaggcgctgagcagtagccccagtgcttctccagcattgtcggtgtgacaattacatcattacctacttcttctgaaatgacatggccatggcttcagtaattgccaaaacccaacatcctcgttctctgttatctgcttggtttgcttttcacctacgcttatcatcacttaacatcctgtgtatttcacttatttgtcttttctgtctgtctcccccagcatgcaggagaccctgtgaaagccggtgtgctgtttagtcgtggggcacagcaggccctctgtgctgtacacgctgacattcattgagcacttaccatgagccagacgtgggcctcccgtcgtcttcctgtggccctgtctcctggcctctatcactcccatttcacagatgaggagaccgaggttcataaagcccaactggctctctagctgggagtctcacagcctgtaagaggcagagctgagatataaagtcaggttttctgttctcaaagctgtgttctttaccattacaacttgagaaaaatgtatgaaaggccataaacatattccggtgctcagaatattgtattgctttttttttttccttttctttctttgtttttcttttctttttgaggcagtgtgtcaccctgtggtccaggctgctgcagtgcagtggcgtgatctcggctcactgcaaccactgcctccttgattcaagcgattctcctgcgtcagcttcccaagtagctgggactacaggcgtgcaccaccacacccgggtaatttttctgtttttagtagagacggggtttctccatgttaccctggctggtctcgaactcctggggtcaagtgatccatccttctttgcctcccaaaatgatgggattacaggcatgagccaccacacctggccttgtcttgcttttcaacaaatttatattcatgacaatagtaactacctatattagaagcacagtagaaacatatatgcagacttgtgttttttttttttttttccaccctatggcgagtgcttatgggcagggccaggtctcgcaccccatggcagccagcctggcccatgccgggcactctggtctctctgtgggacgatgcaggcatgcatggcaagaaaaatcccaaagcagtcccctgagcccctgccatggtctgtgtccatagatgcataaccatcgattcagcgcaatgtagtattttcgaagaaaagtttttgttgaaccagataaaatgcatacagagaagcacacatactcaggcttcataaaaagtagccttctctctgtcccttcctccctctctcaacttgtcatggacatagcgggtaaacttaaggcgctgaatgaatctgtttagtgaaaaatataagtaaaacgacaaagtgtacctcaatggcgtgtgtaatgataggccggcgtcagccctgggtccctcaagatctcagagaagacattctgagtcctgtgggggatggattgatggggcagggggtgacagcaggtgtccggaggctggaggcccagggattgactgcaggggctgccctcagggcacagagcttctgaagctcactagggcctcaggatagaccagcaggactcctgagaggaggaagagaggcagccctgtctgccagcctggacacttggcggggaaccctgggaatgaccacgcccctctgagcctccgtttccctctgctcgtcggacaaaaacatccctcccattcttttcctccctcccattccttccctacctcccattccttcgtctcaacctcttttcctggtattctcttgaaggctgtgttgctggaaggcactgtccccagctttcttgacactgtcagagggtgtccaaaggaggcttctgtcacactggctcattcccatgatttcgggaacaagagagagatgtgggtcaccttgtccggggtcctggcagctcacttctggatcatgtccagcagcctcgcttccccaagtggatgtgggtgtccctgggagagaaaacccatgtcgcccggcttctgggccatctgctttcttttagggatgggcccaaggaatttttcggcaaatttgtcctctgggaaatttctgcagaacttgtctgatgcttccatagaacttagggattgggttaaggccagttcctaggagagacattgcagaaatgagggccttaggatgtctcagtaggacccagtcctggcgtaaacaacaaataacaaactaaacctctcacctacacacccactgaaacatcttttggttctctgtgcaaagaaagcaaggagagaaaacatattctcactttctctcatccatccatccatccatccatccatccatccatccatccatccatcacatttctatttcctcttgaatggtttagatcagggttggacccactacttgtctttgtaaataaagttttattggaacacaaccatgatcatttgtgtattgtctgtggctgctttcacaccacaacagcactgctgacagttgtgagacagggcatatggcccacaaagcctgaagaattttctctctggccctttacagaaaatgtttgctaagctctgatttagagttatagcagattcaaatcctggcttcattaataactagcagcatcacttaagaaaagttatttctcttctgtgggcctcagttttctcatctataaaatgggatcataatggtacccctggcatgggtcattcgtggggagatgtctttgagcagttgacccagtatctggcacacatgaggtctttaatcaagtcacattactctggacaccagctaaggtgccagatagagatgtaaggtgctattttaaggaactcacaacacaaacagctggagacagtgcacagaaggtactggggttgaggcgtgtcccgggcttgtgagaacccagaggcagagtgcccttctttccatactggcatctgggggaggagcactacttagcgattcaaagacaaatgagctgcaggtgcacacagccacatggatgaagctctcagacatcatactggccaaaacaagccagacacaaatgtgcatctgctgtgtgattgcatttataacatgttgaggaacaggcagagctaatctgtagagatggaggtcaacactccggaccttctgggctgggaaggggagcaggggagcccccagggcatggagatgctccccatcttggcctggctggcaggtgcacaggggtgtgcattgtcagaatgaacccactgaagatttctgcccttctgcttgttatgcagtttactggttttctttctttctttctttcttttttttttttgagacagggtctcgtgctgtcacctaggctagagtgtagtgacgtgatcttggctcactgcaccctccacctcccaggctcaagtatcctcctgcctcagcctcccaggtagctgggattacaggcgcctgccaccacacatggctagtttttgtgtttttagtagagacagggttttgctatgttgccctggctggtctcaaactcctgggctcaagtgatcctcctgccttggcctcccaaagtgccgggattacaggcatgagccactgcgcctggctgcagtttactgtttatattttacttttttatgcaccttactgtttacatcttaattttttataaaagaaaggaatggaaagagagaaagaataagagagaggattcagaaatgggagaagcttgggcagtcgagggctatctcctggtctgtgtcctgtctcaggcccctgcctgagacatccttgtacccaagcctcctctgacaacttctcattccagaccagggtcgcacaaactctggctccttgtgctgtttccttggcggagaatgcctggcgctcccctccttaccttgacagccggctcaaaggccacctctgggcagccctccccgtgttccagggtgcccctccctcctgtccttgccctttgtaccggaccctcctccttcctcctgcggtgcctttggcactgtggtgttgttactttgcactccccattactttgcaccctccgctcaccctgctcatcctggggctcccaggccagtgtctggtagaagcaaggcaggactcaaaacaacagtcctggcttccatgtggccgttccactgagcggctgtgaccgaggcccactgcttgatggacccgaacctccttttctcctccatggaactggggagtcttagcagtgcccctttcccaggatccttgggaagtatccatgagatgaagatggtccctggaggctgctttggtgaggacctggcatgtggcatgtgcccagtccaggctggctgctgtgggccttccaaatgcatgtgacttggcagttggaaatgatgctgactttagggcatctttgtgtccatcacctgttccaatggcaaaggtgcccagtggcacagatgccaagggctgcaccctggggacccagattttcatccctcttctcatgcccacgaagatgactggggctggaggggtttgaatgtggaaatatcagtcgtttgctctattattaaaccttgagccatgtggccataaaagggggtggctgccatagctggtttcgtgattaatgagcccacgtcctgcctcttgaccgtctccacagagccccaggcaccagctctgccctcccagcccagctgcaggctgtgctgctgaggtctgggcagcagagaagggtgcctggagggtctttctgtcgtcttgatgaacccatgacccctcctgggtccccaaggagagttgggtattgtaggcttggttgagattggcgagaggtggtgttgtgcctagcctggggggttggagggcggggggagtttctgctctgcagccctgtgatgcgcaggtgccatcgggtctctgaccccaggccatcaagagctgtgcgacctgcttgccatccatcatgtggagctggtcggtcaccccatgcaccaggccgactccaagccggagctttcctctccgctcttttcggagtaatccgtggatgatggaggagcttggcaagcatttcagcaaagctcttttttcttgttgaggcttgaaagtaatcgcctccgtgtattgagtgcccgccgaccacctggcgcgtctgggcattgagctcattggccgctggcacaaatggatcctcgcctcacccggtgcctgcctgtagcctctcccatctgctttctcacagctacactccctccctagcaccctcttgaggagtctgggggagggggcagcataatcatagttacctgtatcagatgctcacctgtgctgagcacgccacatgccctggcccattcaggtgctctctgcaaacacccttaaggcaggtacagtattccttcccttccctcttccctctacccttaccttccccctaccatacctttcctcctcctgctcctcctccccctcctccccctctttcctcctcttcctcccccccttctcctcctcctccccctccttctcctcctcctcttccccctccccctcttcccccgctcctcctcctcttcctccccctcctccccattctcccccctcctcccttttttgagacaagatctggctctgttgcatgggctggagcgcactggtgcaatatcggctcagtgcaacctccaactcctgggttcaagtgatcctcccacctcagcctcccaagtagctgggactacaggcacccaccaccatgcctggctaattgttgtatttttttgtagagacggagtttcgccatgttgtccaggctggtcttgaacttaagagctcagagccatccaccagcctcagcctcccaaagtgctgggctgacaggtgtgagccaccgcgcctggccagcattacctttttcttagttgtaatctaattcaaagtgtacagttgggttgatttcaccgtacagcagtcccccctttcccatgggggatatgttccaaggcccccagtggatgcctgagacctcgaatagtactaaatcctatatacactgtgttttttcctaaacatatatatacctatgataaagtttttgtttttgtttttgtttttgagacggagtctcgctctgttccccaggctggagtgcagtgatgcgatctcggctcactgcaagctctgcctcccgggttcatgccattctcctgcctcagcctcccaagtagttgggactacaggcgcctgtcaccacgcccagctaatttttttttttttttttttttttgtattttgagtagagacggggttttagcatgttagccagaatggtctcaatctcctgacctcatgatccgcccgcctcggcctcccaaagtgctggggattacaggtgtgagccaccgcgcccggccatacctatgataaagtttaatttatgaattagataccataagagattaacagcagcaatttaaaaaatagaacaatatactacaataaaggtaatatcatgtggtctctctctctctctctctctctctctcaagacagcttaatattttcagaccatagttgaccactggtaactgaaacctctgaaagtgaaatctcagattagggaggactgctggattcaccaggttgtacaacaatcactactaattctagaacattttcatcccccaaaatgaaaccccatacccattagtatcataccccatttccccgtccctgccctggaaaccatgaacccactgtctgtctctatggatttgcctattctggacatcttacataattggaatcatacaatgtgtggtcttttgtgtggcttcttttgctttgtgtaatactttctttccttctttctttttttttttttttttctgagacagagtcttgctctgttgcccaggctgtagtgcagtgacacaatctgagctcactgcagcttctgcctgccctgttcaagcagttctcccacctcagcctcttgagtagctgggactacaggtggatgccaccatgcctggcttatttttgtgtttttagtggaggcacggtttcaccatgttggccaggctggtctcaaactcctgacctcaagtgatctgcccacctcggcttcccaaagtgccaggattacaggcatgagccaccacgcctagcccgcataatactttcaaggttcatccatgtggtaatgtcttttttttatcgctgcataatactccattgaatggatagacaacattttgtttatccatcatctgttgatggatactgtttccatgttttggttcttatgagtcattttgctttgaatacttgtgtgcatgtttttgtgtgaacctatgttttcacaactcttagatgtatatctaggagtggaattactgggtcatacttaacttttcgaagaactaccaaactattttacaaaaagctgcctgcatcattttacattcacactagtggtgtaagcaggtttcactttctccacctctccctcaacactttttttttgtctacgttcttttatttatttggtttttctctatccatcctagtgggtatgagtataatctcacttttaccagggagaaagtggaggctcagagataccaagcgacttgcctaaggccaagttgtggagtttggattcagctctagaaaatctgatttatttttttaaaaaatctttcggccaggcatggtggctcacgcctgtaatcccagcactttgggaagccaaggtgggcagatcacttgaggtcaggagttcaagaccagcctggccaacatgatgaaaccccatctctactaaaagtacagaaattagctgtctgtggtggggcacgcctatagtccctgctactcgggaggctgagggaagagaatcgcttgaagccaaggaggcagaggttgcagtgagccaggatcgtgccattgcattccagcctgggcaacagagaaaggccctgtctcaaaaaaaaaaaaaaaaaaaaatttcaattggaacattgcatacacacaaaagagtacacacattgtatactgcttgatgaactttaacaaagtgaacaccctgtatcaccaacagccagaatccagacctagaatgctgccagccctccccagaagctcctatttgcctttttccagcgccatccctccatggggtaaccagtaggatcaacaccatgtcctggttttcccaggattttcccaatagagtagtgaccattcaacatcccaagaaaccctttagtcctaggcataccagacaattggtcaccccaataaccagtaccctgacttcccacagcacagactcaggtgcacctctttctgaagtttgtatgggtggaagcacatggtgatgtacattgatgacatgcttctgtccagttgcttttgctccatgctcagtttgtgtaggtcatctatgtgttgtgcatagttgtagaccatacattctcatcatttaggcttctgctgagtggatataccaggatttctttattcattcttctcttgatggtcatttgggtagtttctagtttgggctacctaatgctcagggaacacttgtgcaaacatctttgggagcacaaatatgggcctttctgtggaggaaggggattgctgggttctaggggactcatgttcagcttcagcagagctgtcacaaggtggattcacagtttaactccctccagcaatttaggattctgtttgcactgtgtctgtgccaacacttatcatttttcatcttttccatttgagccagtctgctggtatgatggtctcatactctggtaacccctctggtctttaacttactagttgcctgtagacaaaggccagggcgtgaagtccaaaggtcttggttttcttcccagctctctcctgaatagctgtgtgcggttggtcaagttgtgcacctgctcagagtgttcatttctggtctgtcatgagagtgatgcaataccttcctcttgcaggattgtgggattaagggcttgtggaggtgggaagagccctggagatgtgggaggtgagcgaggggagcgggggggggggagtctcccagcctggaaggtcctgggactagagcagggggcgggacacctgcacccaggccctccaccaactccgtggggctccagcaggggcttgggccagttcccccattcagcttccttttggggttcctctgagtcttgttggacactcaactgtcaaagatgcccagtggcacatatgaaaagtgccacactcaaggacacagatttctgttcctctcaccagccatcttcagggatcatctgtctcccccccagcttgatggctctgtgatggcagagccgtgtccctctccatcactggcctatccccaggtctgggcatagggttgcacctaggaggcctctgcttgttgaatgacttcatgaattcagtccttaggtgacagctcttatccagggaggggactggaggatcaggacataactgttcccctgtagttctgagtctcggtttcctcatctgtgtggtttttaaaagtactaatcctgaccacaaggctggctgggaggatgaatgtgctcgggaagaaggtgttttggaaactggcacacgctagagaagtggagggtatcgcctacaacagagctgaccaacaggagggtatcgcctacaacagagctgaccaacgggggtatcgtctacaacagagctgaccaacaggagggtatcgcctacaacagagctgaccaacagggcggcgcctggccacatctggctctttacagtcaaattaacaaaaattaaacaaaatgtgtaatttggttcctccaccacactggccatatttcaggtgctcagtggcccacaggtggctacagcattggccagtgcagatacggagcgtttgcatcatcacagacgatcctgtagggcagtgccagtatcaactcatttaggctacaaagaactttagagctatcaccaagaaagtaagatcaaataaaacacaagagggatgtatttttctcccatgagattttcttgctcaaagcctcattacttttactttacacatggttctaacagactgcatgccctggtttcacaggccacaacagaagagcagtaacgttcggctgggcatggtggctcacacctgtaatcccagcactttgagagactgatgcatgcggatcacctgaggtcaggcgtttgagaccagcctggccaacatggtgaaaccccatgtctactaaaaaataacaaaaattatctgggcgtggtgttgtgtgcctataatcccagctacttgggaggctgaggcaggagaatcgcttgaagccgggaggcgggggttgcagtgggccaagatcatgccagtgtactccagcctgagtgacagagcaagactctgtctcaaaaaaaaaaaaaaaaaaaaaagagtagtaaccttttgagggcctggcatgggggaaggtgcagtgtcaagtgtcagcaaaaagaactggtcagtcggcgtctggagaatggttggagaaaccatacaaaatagacacagtcaccccaactctgcagccattgagaaaggtgcaggcagctcccctgtgcccacaacaccaagggcacagctgggttgcagcccagctcaccagtggatcacagtaataataacaacagccccggggcaaggagaggtcatattacctgagggaaaccaggggagggagagtgtgaacggcatttgagatttcttctgggaccaaggcccaaaccggcccttctaggatcatatcgttacctgccactttgcgtttgctgtatgactttccgtttgtgagattaaaaagaacatgaaatattttgacgggccttccccaaatgagcatccatgggtttctgccttggaggccaagctgatctataggtgtctgaggacctgctgcgtggggtagcaacagaagggtggacctgaggcccctgccatgctggttccagctgtggctttggctgtggtcccagctcctttctcataatatgtacttgaggtgtgtgagcacaaaggtacacaaattggagtttgcctctggccagaggaatttggcataacagagggatggaagttgctgtcttggggggttacgaaattgaatcctgggcctgtcttataagagcaggaggcctgtgtgagacatcccctgctctgtgcctcagtttcttcctctgtagcatgtggataacagggataaaaacagcctccccgccttagcattgttgtcaagttaaatgagggattatatataaagctcttagcatggtgctggccacatggtaactgcttgatgaatgttaaccacgggcacctgtgaatgtccatatgggtggggtgtagtgaggctagcgtctgcatagcaggtgtccttccttctgtcatcattaaaaaaagatatatggcagcagtggtggctcacgcctgtaatcccagcactttgggaggcagaggtgggtggatcacaaggtcaggagttcaagagcatcctgaccaacatggtgaaaccctgtctctactaaaattacaaaaattagccaggagtggtggtgggtgactgtaatcccagctactcaggaggctgaggcaggagaatcacttgacgggaggcggaggttgcagtgagccaagatcgcaccactgcactccagcctaggcgacagagtgagactccatctgaaaaaaaaaaaaaaaaaaaaagatatataaagctggctcttcactatagtcaaaagatagagacaatccatgtgtccatcagcagatgaatgtataaacatgtggcctgcccatacaatggaatgtcagtcagccatgaaaggaatgcggttccgactcatgccatagcacagataaacctcaaaaacagtaagtgaaaggagccaggcacaaacagccacaaagtatgtgatgtcatttatgtgacatgtccagaacaggcaagtcccattgatagataccaggctagtggctgcctggcgcctggggatggggtagcagggagtgacgacttaatggtatggggcttcctttgggagtaaaaacatctcagaactcgatagagatgatggtgacacagcatcaggaatggactcaatgcccgtgaattgtacatcttaagtgattaatggttagttttacgttctgtgaattttactttgaattttagaaatgcagccaggggaggtggggactgaagcccattctcccagcgcaagccactttgagcaccactgcgtatgacactgtgatggcagcctcatcattagtgttgttggtgttgttgctgttgactgtctaagcagggctgccatccaacttctcgtttctcctttggggccccagggtgtgtgtgcaggtccagcaaatccttccttacagtggggtggtgccacgtggaacccgactgtgcagcatgggtgtcccctgtgtgataattcaagccgcttccacgtagggagagaggggacttgactccagcccagcacatccacccagctgtcagggccacacatgccccatgacaaacagctgctgttttcaaccccatccccgactgggcaaggtttctctggcctcgggaataagctcatgggaggattttccagactggcttcttttggggtccgggagctcctcccttccctggcacatgttttgagtcagcctggacgtcatgattcgtattcactttgagaggaatccccatggaaaccagcaggcaggtttgggcaggagggagctggctcaccacaaaggcaagggaaggcgaaggctaggtgtcttctgccagcatcgggggcccaatgggggctctttctgggggggtcagctcaccccattccccacccactctggaagcaggtctgaggccatatctggtttggaatgccagttctgaagatctctgggggttcacatgggaccctcatgaggtccttctaggccctattttttccagcccagatccagcattgtgtgccactggacagggggctcacctggaaacaggcagaggtgaagtatctcttcctggtctggcaaatgcaggatcccccaaaactagctccatatctgtccccgagagcaaaaagacaaaggcagagttcaccgacccattctccagctcccatggaaggcagcgtcccccggggccagaaccccagcttgtgggctgccgcatctccaataccctctgggcaccgtcaccttgcgggcactcagttagcgagcggtcccaccaaacctacctgggttcgctccttgcttctcacatggccctgtcaagctggtggcccaggacaaaagccccttagccttggccagggctctccggttccctttaatatccatttaatgagagcaatttggcaacaacgtaaaacgtgctcttgccctttgtcccagtaattccatttctgggaatctggcctaaggaaataatcctaaatatagggtagaaaaacatgtttcacaaggatgttcactgcggagttgtgcatggcagcataaaatgaaacagtggcactgtccctgagggagggggtgagagcagggatgaaattgatggtggcggaatattttatagctgctacagtgagagttctggagcttgccattcagagcagggacatctatgtgcgataatgtggggaaaaaaaaggcgttacaaaattctttgtactgtatgatttcggctttataaaaaattatatattaaaataatcaggaaagtcacacaccagagtgctaatgagtggtcttgattggatttttatgggaaagattttattcgtcatcttccaaattaccttgtcttcacgcattgcctttttcagtcaggtttgcgttgtaatttacatacagtaagagtcacgcttttagcgtgcagatctgtgagttctgacaaatgtatacagccaagtgacatcgcccccacagtcaatacagagaatattcccatcacccccaagagtccccctgcccctcgcccgccccagcggctggcaaccatgggtgtgatttcagcccctgtagttttgtttatttcaggatgtcatataaatggaatcatacagtatgccttacactgctcttaacgtttaggaaaaaaatttttcgtctgcttattgttctcttagctgtacatcttagagcaggattccctaccatccctcaatggaggagaattttaatgttctttcttatccaattcagcctcctaccccagacaggaatctcctcccctggagctccggtcgtcatgttcagcttaccagggaattatcagttatctgtaaaataatcccagcgataggaaagtacccagaacggcagaggtgcctgggcagtgttagctcatatctgagcccaaggaacagcagcgttcagaggctttccatcccaatccagcccatgtcccctgcaagcctcccgtgttcctgcccagtgatagcactacagcagcagcagttttttttgtttggttttgttttgtttttgagaaggagtcttgctctgttgcccaggctacagtgcagtggcgcgatctcggctcactgcaagcttcacctcccgggttcacgccattctccttcctcagcctctcgagtagctgggactacaggcacccgccaccacgcctggctcgtttttttagtatttttagtagagacggggtttcaccatgttagccaggatggtctcgatcaaggtgacgtcatgatccgcccaccttggcctcccaaagtgctgggattacaggcgtgagccaccgcgcccggccttgtttttgtttttaaataaacattttcttttaggacagtttgagatgtataggaaagcgacgaggataccccagagttctcacacatccgcagtctgcttccccagctgctagtatcttagtctgtgggctgcgtttgtcacaacttgtgaaccaatattgatacatgattgccgaagtccacattttattaggtttctttaggttttccgtgatgtcctttttctgtcccgggatcccatccaggatccccacagtacctgtagtcacgtctcccaaaacttcccttggctgggatagctgctcaggctttcctcatgtttaatgagcactggtcaggagttttgaggaaagtccctcagttatggtttgtctgatatttttctgatggttagacttgggttatgggtttggggaggaagaccccagaggcaaagattggtctttctcaaaatagttcgtttgattgcgttctttagtttgttccaggtactgtgctgagtccttgataaactggatctctggtaatgctcccaggaattctacctattaaataaattctcatcttaaccagtagaggaaatgaactcagagagggggagtaacttgcctaaggacacacagtaagcggcccaaacacaagtctccttggtcctaaaaagtctgcttttggccaaatgctgcttcaggcagtaggcatgcagcttgtctgctttttaaaaacagtatgggttgggtgtggtggctcacgcctgtaatcccagcactttgggaggccgaggcaggaggatcacctgaggtcaggagttcgagaccagcctggccaacatggtgaaaccccatctctactaaaaatactgaaaaattagctgggcgtggtggcgcacgcctgtaatcccagctactcaggaggctgaggcaggagaatcgcttgaacccgagtggcggaagttgcagtgagctgagaatgcaccattgtactccagtcggggtgacaagagcaaaactctgtctcaaaaaaaaaaaaaaaaaaaaggaccggctgcggtggcttatgcctgtaatcccagcactttgggagaccgaagcaggtggatcacaaggtcaggagttcaagaccagcctggccaagatggtgaaaccccatctctactaaaaatacaaaaaaaattagccaggcatggtggcaggcgcctgtaatctcagcttctcgggaggctgaggcagagaattgcttgaacacgggaggcagaagttgcagtgagccgagatcgcgccactgcagtccagcctgggcgacagagcaagactccgtctcaaacaaaacaaaacaaaaaaacagtatgtatttatttatacccaacctttccctaaaaagccttggttgcaacttcagatcaaagccacgttaagacagctaaggcagggcatgtgaaaggtagactcagaaagcctctgtccagtgtgttgtgggtggtgcttacagttaaaacacggatgaaagttgcctttatttttgtaagatagtcattaatttgtcaggaaattagtaatcacctcctaaatgtcagacgccatttaggcatatgaaacagcaggtgaaccctcctgttcccacagtatataaacagtagcaggggacacagacaatcagtgaccaacacaataaatatttgaatatgggtgaggaaaagaagtacagaaccaaccaccaagccctggcttctccggcagtgctcaggacaagacatactgttagggctgagtcatttactgcagaatagggagaacagaacagtgcacgggatgctggaacaggccagaacagtgaagggcaggcccacgagtgtgactttgaggcacgctgcataaagagaaccttcttgggtgacacatggcagccgccgggattgggggccagggggtcctctgaggggtgagcgatgcagtggtggaaaggacaggatgaacgcagctgcctcctcccctagattgtggggtccaggcagccttgtcgctcacctggacctgtgcagcagcctgcaggctgtccccctgccaccactgtctcctttcaagtctgttttctatgcagcaatccctgtgaaccttggctaaagctcctgcaaacccctgggaggaatccctgagcccctaggtggacctaccagcctctccaggagtgacccacccttctctccaacgcatcgcttacccagccctccctccgtttcaccttctgctcctccttgaacactcccagctgttcccacctctgagcctttgcactggccgtggggtctgtgacactctttactcctgctctcggccacctgtcatgacaccccattgtgattctttatgcggcccttgccactctccaatagtttatttatttagatattttgtttgttgtctgtttgcccactaagctcctgtcttattcactgctgaatctccagcacctagcatggcgcctgcagcataacggaagttcagtaaatgtctgtcagatgaatgaaggaatgaatgaaaaatgaattgatcaatcttttgtactttttgagcctagcaattgatcacatcagggaaattgaggcagcttcagccatcaaccctctctacctccacccccatcaccataactctcgtttggcagacagatactgaaattaacaaacctaacagaagtcctccatctttatggtagaattaacctgttgggccttagactttgaattgcctttgcctctttcttggaacacaggatagaggtcaggcttctgattccggagtcagatggccgagttcagtcttggccatgccactcctagctagatgaccttgggcaaatcacgtgacctcctgagcctcagcttccttgtctatatgatgggatgaccttgatacctgttccacaagacctgtgtgaggattaaatgattgccatgtgcccagggtgcatgggagagccagggaggtgttcgctgttattcttctcagctgtgctgcactcacctgattctcctgaagtctggcttcctggagccaaagtgacaaggacacccgctttggctcctggtggccattgtatccctcggtcacctggtgccttctcgggacagcaagactcactcagagagtggtgggtggctgtggatttatcttgccccgcccctactcccaacaatgaccaatactaatagcgtttctcattcttttcaacacatgctattgagcacttgccatgagccaggcactggggaaagagtgggaaccaagacagacctaggccctgacttcatggagctagcagcctggccaggaggcagacatccaacagataatgacacagaataaagccacaaataaatagggtgtggtgagcaccggaaaaggagggcacagggaagggtgcaagcaggttgggtcatgagtctagagggtgggagttccccgaaaagtgcagttgagatgagacctggagagtagaagcgcagatgccaggggtggggctgtgctctttctgggacaaggagccggctgagtttgaggcactgttatcagggcagtgtgaggagtgtggaaagggagagatgccgccgagaggcgggactgggcgcatagggagagcagaccccgctgggtctgtcgattgtggatgggagtgtggattttgtggccgggccattgggagccattgaagaatgttgaggaggagggtggggctatggagttttccatcttggaacgtggctctggaggccgagtggaggatgcatatccgtggggagagggagaagagaaatcggtgctttctgggcaggagaaggtggtggcttattgctggtgagggatggcgggcttccagccactccctgcgctggccccgcggataccaagagcagcagtccctcagttcttgccctccagctgctcccactctgttcctaactctgcacctccaaacgtgtgggtggagttttacagtgaacccccttgcagctggatatggccagccagaaacagggaggcttgctttggtcaccagaggtgctgagctcctgcaccagctccatttgcctgtcgccagaggggcgatgtttccaaaaccgtctgagatgcggacgtcatgcctgctactgtaaccaatgcatatctcttctttttctttttttgctgcagccaactgggtacatggaaaactcagtctcctacagcgcaattgaagacgttcagctgctgtcctgggagaatgccccgaagtactgtttacagctcacgattcctgggggaactgtcttactgcaggtaggagaaataaacatgaacaagcagtttcttctccctcatcttcatgcacttgtgcccctcgtttcccttggagggagccagcagctatcaagaggaaaggttgtttaactttgggtgattttattccccaagtataagaaagctgtaaaccaggtctgactggagaaaacgaaaaggactgtgcatggcctgagcgtctcctgcacacctgctgcagtctaggaacttttcaggttgctcatttagtttcccttaataaacctgataaataagttttatgatccccattttacagatgaggaaactgaggcacacaggtgagttgttaggcccaagaaggccgtgaaaagcagatgagcaatagatactgactttttgcattactttgagtgagggagtttctgatatcttgttgatctaagtcttttgaggctgatagaagtataagctatctttttgggaaaaaaagtgcattctgtatgtactggtcaggacgtttggttggaaatggcacaaacattattccaactagtgagacaaaaagagagtttaatgctgttaactattaaattaactattaaagtaactgggaagccttagaggggacttcaggcattgctggatccgggggtcagatgacatcattaatattgggcatctctctctccatctcctggctgtgcttctgtgtgctggcttcattggcagaatctcaccatgtggtaggaaagatgacccacctgcagcccaaagccacatccttagaggctgtaatccttaagagtgagcgccctttttctttccagtaccttttacaaaatctcatggaagatcctgattggctctgccgtgttcccattcagcccccaggaattcactcccccggattacccgcccacccttgacctcaggcaaggcccaggtctcggattggtagccccaccaggaccacacagaggcggtgaggtgcgtccaccaagaatggagaagtgactgacaaaaaccacgaccacggtcacacatacataagacatgttacatcatgtcaggggagccagccaattttcagaaggaaccccgagtctgaaacccctcatctagagaaaatttactctcttatcagtgggaagaagacctgccttgctttttcttttgggatcattttattcctaacttgtttttccagggaaaccttctcttagcccaaagagatgctttctaaaaacctattttagatctagcagccactggattgtgtaacagcattgggctgagagtcacccagtctgggctccaaggaatgctgagctcagtagcggagcgtaacaacttagcattgttagaaatgtcctgtttcttactgtcatctctcagaggactctggaaaccacgcctgccccagtctgctttcttcttagtgaatctctcacactctgccctctacgcttttcttttaaccctgtccccacacccccacactgtccctccccccctccccaccacagccagcaaagccttcctcttctttctttctctcctctcatctttatgatagaggtcagtgtcaccctcctgccagacacttctgccagctcctctgcctcttcactcgctccttcttgcccatccgatggctgcagcacagagtccatgaagggggtggtcagtgccagcccccctcggcgggggagatggggcgggcaatcacagggttcagtggccaacggagaggtagggtagccagagattgtcctaccccaatgactttgctgtagtcacagagctttgaggcagcctctcccctgtgctcggggaggccccatgcgtgaagagcccctcagcccctggggagacagagccataaacaaatgattacggaaataatggctaaattagaggcaaccgtggaggactgggagcccagagaaggaggaacttatttggcctggggggccaaagcaggctccccagacagggggcatttgaactgggtgtagagggatgagtagaagtgtgccagaatggtggggtgggggcacactccccgggcagaggggatgtgtgtgcaaagcctgaatatgggggacctgggtacttgctgcagctggaggagatggagagatggagtttggggctgtggatatgtctagatctgttgggcgatggccagatcacccaggccttgccagccaagtgaagaagcctcagaccctcttccaaaggcaataggcagccactgaaagctctgaaggggtagagggacactagaggaatcagtgtggtggcagggcagaggggcctagatctgtgcatgacagagaggcaggagggagccccttgaaacattccagttggaggagaggaggccctgagcctccactttcctgctccaccagcaaaggggcctcattccttctggggctggaggggcagccctggcctccaaaggaggccagagcatcactcgccacagggatggaggggcagtgaggctgaaaagcagagaagcagtgcctggaatgtccctttaacccggctgtggccgcgggcccagctgtgatgactcgcctggccgccgtgtctggcagggcttcaggacagagctgccgccgtggtgctgaggagccgagcgggcggggagcctctagctgctccagcatcccacttgctcactgccccctgatcccgtggacagcgcagtcagaggcaggagcaggagaggaggaagcagaggaaaaggaggaggaggaggcggcttgcaactcctcagatccagagccggactccgagctaatgagggagcagcagacacggcctcccaacccttcccccaaggggaacccaggtgggtgcagcccctgcccctggcggctgtggttctctccctggctgccatttccgtcaggggaggtagacctggatcggcttctcccttgcttccctctcatcctcacccccacactctgcccaccgtgatgcatgggtggtatgtagctggctcattctataaacagggctagcgagtctgtgtggttctagggaggctggggcggggtgcacttggcccctggtgtggtactcagggctttcttcagtcctggttgtattcacgtgccttttgtgacgggtggcaggaccctctgctttgagaggctgtactttgtcttgattcacatacaacatactgtattagatcccagagccgtggtgtcacagagaacaacccctttggccctggggacagatcttccctgctccagggtgggagaggggaccaagaaacagccaggtgcccatctgaacggcattaccttagtgctcctagtcagcagatgagtgaaagtgccttaaatggtgccgcccggcacagccaccagcagccacgcatggcagcccacagatggatttaatttactcatcaaattaataacacagttcctcagtcccgttagctacacctccagtggccaggggccacacatggccaaaggctgctgtgttggacagcgcacataaagaacatttccattgacacacgaagttctgtggagcagtgctgacctcgaggccttttcattttgacctcatactgcaggcacctgagcccctcctggggcgaatcacgtcagatcacagggggctcttcgatcttgcagtctggctgtgctgtaatgcagtctgcaccctgctgcattacagcacagccattctctctacagacaaggggaatggcggggcccaaagagggctagtgccccttccctaccccagcctgcctgatctctctccatctctgtctctttcaggttctttgcatccatgtgtgtctgttttcctctctctcatgccttttctccatctctctcccctccttccccttctgtcccctcctgcctctcctctttctctctctttagtccttgctgtggctcactctgggcttctcttgcaggtccttcctccaggcctctcaccacctctgagcctgtcccccagtcctctctgtgtgtctctcccctcttctcttcctcctcctccgctctctctgtcttctaaggagctctttgtaaaactcttactttgttagaatttgaatcaatgcctcttgcagacctcggggagctgacctgatccttcaaggaaggcagagaggacattcaggcccatgcccctcatccccagctcagagacagagcaatctaccagcaggttgagttggcagacagaggcgcccagccttccagcgtgggtccagttggtgtgttttggatgctttgtgttttcagcgtgagctccctcactgccatgttattagaatccctcgttgcagaaagggcctgtttatcccatttcctccattgatgccctttctgctagcatttcattgtggggaggccaagcatgtaagtacatagacagtgtcatgaaaacgtcctgaaggtgctgtcactggcccctgggatggggtagcaggcattaaagagcagcgcggcgcagatcatcttctgggggattctgcctaaaaattgagtggctgcccatcagcaaaaattagacagagccgctgctccacaaacaaggcttcaggcaagataagagcagggagaccctcctcccaagagtgtctgcttctttcggggatgggttccgggactcggctcttctcaccaatgttctggaaagtcctgcaggaggcggggcaactgtttaccccaaacattggcagcagggcagggacggggtgggttcctttcttactggaaggtagcaagcaggacttttccggtctggaaagcaccagaaaggtctcactctctagcttccagtaagaaaggaagctccttttccctaagaaactgggccggggaaggggagcttggaaaaggtcgctcacagcgcaccctgggctgtttttctcacctctcaagacaatgcaacaatgagaaagaacttggcaagtttgggagaggaaattgggcagcgtttgcctggaaccaggccctttcagcattccaaagatttaacaccagaagtcggaagcctggaaccagctgcccgcaggcttccgggggacttggggtctggctggggacctctcccatgtctgaatggattctcctctgagtgaccctcagggttgggctgggggacctttcccaggtctgaatggattctcctcagagtgaccctcggggttccagccatgccttatgttcccactgggctgagttctcttggctcagccaccagcaggacagtatggggactctgcacagaagcgtgacccttcccccagctggaacgcagcctggtcagctttccctttgcttggaagccccttagagatgcctgtgctgggactcaagacattgcctagcagcgtatgtcctccttcaaaagtagacaagccaaaggaacgagcagtttacagtccggccttgtcccaacctttttggctccatcagcctccacctgctctcctagaggcaagttctggcgcttcccttagtttcaaggtgaggtctcctgcgtgccacatccttcctcctcctgcttcatcagtagggcagctaccatggagaaataatgctcacggatgtcccaacccaagtcctgggaatccagaggagctcagatgcattgcttcatgttccagggctggattgcagggagggaagactgtggggtcagacagacctgagttcctgcccaacttccctgggcactagctctggatccttagactctaactagccatggaaccctaggttttaccacattctagctgtggaaccctaaacagcaggaagaacctctctggggctcatttaatttatctgtgaaacgcactctaatacttgtctccttgcatattgtgaggctcgtagatattacatgtaaaatacttagcactgtgcctggtacttagtaggtgttcaagaaaacactgccatgatcatttttagagtcttagtcaaatacagtttggggaagagagggaatcagagctgaagagttcttttgaaggtctgttgtgtgtggactttcttcgctgagcagaatgggtatatgaatgccccattcatccatccatctatccgcccacccatccatttatccatcagactgtccatctgtcttatctgtttttccatccatccatgtctccatctatccaattcattcattcattcaacacttcaaccaatctttcacttaacaaacatttctccgggtttcatggacacagtggtgcctaagtcagacgtggttcctgacctcccagagcccatagcctgcagaagaaggacaactagacaggcgattccaggacagtgtgatgcgttaggcgaggcattctggcctggtttggttggggatggggaggggaaggcaccatcaagacagtcattctggagaagtggcatttcaggagggacctgaagtgtaagtaggagtccagcgggcagcggagagaagggggtgacagcagaatgttcctggtgggggagtacacgctgcatggaagccagtctgagagcagggcaggccaggtgctgccacagtcaccagcgaccacgcattctaggtggctggaagcggcacggcattgtttctaacttgtgctgtgtgtccaccatgggccagtgggggaagggagtgtgccaagcggtgcacgggttctcaggggctcccacgcgcgggccacgggtcacttcagcatgacatcagctcgttgcattggcctgtgtgcttgccaggagcccggagggaagagacctggaaatgacacaaatgatgaccccagcaagtctgggtgtgtgtgtggtatatgcattggtttccccagtggaaatgtggcagtggaggaaaggttgggttagacctgggtccttaagccgtggtccatggtagattccaaaactacctgcacagtcctgcgtgtgggactgtggtgtgtgtgtatgtatgtctgtatggtttatgtgtgtgtgtgtgtgtatggtatgtctgcatgtgtgtgcgtacacatgtgtgtctctgtgagtgtgtatgtgtctatgtctgtggtgtgtgtggtatgtgtgcatgtgtgtgcctgatatgtgtgtttatatgtggtatgtatatgtgtatacggtgtgtatgcacatgtatctctgtgtgtgcatgtgtgtgtggtatgtgcatgtgtgtgtgtcctgtgtctatatgtggtgtgcatagtgtgtatctctgtgtgtggtgtgtgcatgtgtgtggtgtgttgtgtgatatgtgacgtgtgtgtgtggtgtatgtgtctatatgtgatgtctctgtgtgtatatggtgtacgtgcatgtgtatctgtgtgtctgtgtgaggtgtgtgtctgtgtggtatgtctttgtgtgtatgaggtgtgtatggtatgtgtctgtggtgtgtgtgtatgtatgtctgtgtgatgtgtgtgcatgtgtgtgtggtgtatgtggtacgtgtatgtgtggtgtgtgtgcatgtgtaactatggtgtgtatgtgtgtatggtgtatgtgtgtctgtgtgtgtggtgtatgtgtctacgtggtatgtggctgtgtggtgtgtgtgcatgtgtaactggtgtgtgtgtatggtgtgtgtggtgtatgtgtctttgtgtgtgtggtatgtgtgcatgtgtaactgtatggtgtgtgtatggtgtgtgtgtggtgtatggtgtgtgtgtgtgtgcgtggtgtgtgtacatttgtaactgtatggtgtgtgtgtggtgtatgtgtatttgtgtgtgtggtgtgtgtgtgtggtgtgtgtgtctgtgtgcaggtgtatgtgtttttgtgtgtggtatgtgtgcatgtgtaactgtatggtgcgtgtgtgtatagtgtgtgtgtctgtgtgtgtggtgtatgtgtctttgtgtggtgtgtgtgtatgtgtaactgtatggtgtgtgtatgtgtgtggtgtgtatgtgtctgtgtgtgtggtgtatgtgtccttgtgtgtcgtgtgtgtgcatgtgtaactggtgtgtgtgtgtatggtgtgtgtgtggtgtatgtgtctttgtgtgtgtgcataaatgttgacattacatgggtgtgagtccatagcttgttttaggttctcaaaggggtccataaacccccctgaatcaggtgatctttaaactccctttggcttctgatggaaagatgctcattgttaccgtggacaaacatggctgaagcctctgccttcttccaaagtgcagccagcctaaacgggggtggggaggggaccacggccagctttccttctcgtcgcactggggcagaaggagccgggcgcggtgggtgggagatcttggctgtctctgcctccctggaaggaggcgcaggagagttccgcatcgagactgtcctcagcccggcatctctgtgccttgccttacatgtcattaattcattcagctgtatttttttttttttttttttaacaccaggctcactggagcagtcgcagttaatcctacgtggatcctgcctcctctcccaatcctgtgggtgggacataaatacccagccagcctcagggtgtgggccgagggcttgaagaagtggccgccagaagcttcaggagagcggaggagggatggggtcctggccgaggtgtggggagggcaggggcaggcgccggagtgtgcagaggcaccccactgcctgctccgagcctcagcttcctcatctgtaagatgggtgcgttgaggaggagaggaggtgtgtgtgagcatttctcgtggtgcctggtaccgagtaagcacccgtggtctgtggttggtagtgacatgcgtcatcgcacttagttcgccagcctgtgtcatacctgtttagctgggatctgcaaactaaacctgccttcttgaaccgaaacctgccttcttcctggactgccacaccgacctccaagagttgagaggatcccagagtggaacagaagtggccagaaagccaagtgtggctggggaagggggtcacaccctcctatgggaggaaaggcttggaaacccagatggctctgcctggaaggatggggctgagaagagactgatgtgtagcagtgtctgtggtcagtggctctgaagaaatccgtcccaggcctttagacatcaagtgctgctgtgagaggcaggctacgaggacccagctaagactggaggctcctgcagctcagcaggaagtcacagggggcgtggccaggccaggcagctggggcccaggaggagagatctgtcagccatccctgccaacaactcagcagtgggccggacccagtctggcagggccagaaccatctggatgtgagctcggggcagaggagacgccaggagcaccaacggtgtgaccaggagaagccacagttgtggaaatgctggttccttctgtaaaaatgcctacggggcaaacacatcagaatgtccactttgaaaaggaagaaggggccaagagccagtaggccctgcaggtccctcagggctctcatgtgccggcagccgaaatgggatctggccatcccaagcaggaaaggaatgtactagaagaacggtggcagcctggagaatggcctggagctggggtcggggcatgcaggtggtagtcccatcaccaccagtgcaggaaggtgcagggcaggacccagctcctcccaggtgaattctccctgccccatctccatagcacttgcccaagatccagagtcctgggcaagaacctctgcctggccaagccagaggactggctcacacactgttgaggagggctggaaggccccctaagactcatgagccagggagaccccagatgggaagggctgggctagccatcgtggaggacggtctgtgttgggtttcgctacagaggctggggaagggagtctcctctggtcattctctaccacctgtgacacctgggtcactttcctctttcttcctttgtttctgtgttcattcgttccagtgtaaccagctctggcccagccaggcactgctcacctagctgtggaatcagaaataagaccctgccctcaaggaactcctagtccattcattcctttgttcattcattcagaaaacacctgttggtctcctggtgctccaggccacaggatacagtggtaggtagagcatgcgtggccccttccctcttagggtcacacatatatacagggcactttggcggggccagtggacacagaagagggagggatgtggttgtcctcctccaccttctttttgtctttgcttggccgttccgtccagccggtggcagcttacaggcactgcctgggtccactgtggaccctcagagccagtggaacaactcacatccgcgttataccaacctggttgtacctcctgcttttatttcctattgctgctgtgactgcttgcccctaactttgtggttaaaagaacacagatttagtctcttatggttctggaggtccgaagtccaacacaggtcccatggggctaaaacgaaggtgtcaggactatgttccttctggaggctctcggggagaattcgtttccagcttctaaaggctgtccgcattccttggctcatggccacatcactctgacctctgctttagtctgactctgccctcctgcctccctcttgtgagtacccttgtgatttcattgggctacctagatcatccccatctcaagaccttgaacttggtcacatccagagtcccgttgccacgcaggataacttaatcacaagggatttaggatggaacatgtttagggggctttattttccttaccacctccttctctctctggcccccttggtgtgtgaggaagcacaggaatggatgtggaccaggcatgccctggagccagctcatcccagcttgcacctgcccaccagagctgatcgtgcccgtctctccccagctctggcccaggggcatccccttgaaggtgtggaatcagccaaaatgggattgttcacaacacagaaatccgcacacgccgggatcagggcttgttgttccagagagcctgatgttaagcatttatcagcacagacctggccgtggctgctgacgctgctggcccctgtttgtggagtgtttgcacgtgccaggcaccgtgctgaggaagcacttttcatggattagctcattgtttgggatcttcgcacagctctccccgagcagggtgtattttgtcatcctaatgaataggaattgtcacaagaccagtagagcttgggcagtgctgatgggagggagctcagcaacagtctctccagggggctgtttctcctccttggcctccgcaactctgggcagggggcacaggcttgggtcgtcaagcaacttgctgcagtcacaccactagacacgacagagccgagacttgaacctgcacctgtaagaggctcagcccttgtcggagttcctgtgtcacacggagggcttgcctcctgcctgctttgcacttgggtagactcaagctccaccagcatcagggtggctggtgtggattcgtgcagtccagggttcaaaactctgagtccctgagctcactcaccagagcctgagtcctcaccacacttgctactggaatggatcatttatgcaaggccagagattgctccagaccctgacctcggagagcagctgatgtttcgtagatgacttggggagcgggaggtggtcacctgtagcgtgatccggatctcctcgaacaagggtgaaacaaagcggttacatgcttgagtgtgtgtgtgcgcgtttgtgtgcctcgaggcagaaggtggatgttcgtgcttggagagagactctagccttcgtcagaccccctgaaccgtcagaggcagggtcactttggagagagggttgtgggttctggtggggaacgcacgctgcacttcggcccagcctggggtggaggggtagccaatggggaactcagaatggtccggtgttgtggtttacagcaggggtcagattacctgggttcaattcctggccccgcaccacatgtctgtgaacactcaggaaagtttttaacttccaaagtctcagtttcctcatttgtaccatgagatgacagtaccgacttcacagggctgtcttgtaaggactgaatgagccagtccacacacaggactcagagctgtgtctggcgtccatgaaacaccatagcattactgttctgttagcagaccgagaaaggaggtgagagccgcagtgatactcatgagggatgggagggctgccttgggctgcattttattggaaaggactggatgatggcaatggtaatgataacaataataataacgatggctgcatttctgaccacctgccatgtgccaagcctggttctagatgctctacaagaataatttctggtctttaaaacatccctggaaaatcagggttattgtccccattttacagatgggaaaattgaggctgagatgtccaaagactcacagctagtgtggggtggagctgagaaggttttgtttcacccgctgtgatgtttagcctaggtctgctgggtgccgtttaccatgatcttctgccattggcaggagaaggtcatggttaaatgcccagacttggaagccaggctaccctgggtctgaatgcacttcattgtgagatctcagggtctcgatttttccctctgtgaaatgggcataatgataggtgccacctcatagggctgctgtgaggaccaaggagagactacgtggataacaaaagccaagttcctagaacagtcctcatacacaggcccccagccagcccccaccatcctcactcccaggcctccaaccagttcatcccattccctcccatgcccctaagtccagctgtgtgtgcagttaaagctctcaagtcagcagtgtctgaagtcactcatatacagcaaaggaagcacacggtgctagtgatgtcttgtttttaggaaatcctccctgaccagcccttctgttttggttttgcacacaacaggctcagcttagcatatctttcagcaggcttgttagggtcacagggcagacgctgtctacagagcaggcttgggggctcacatgctggccttgaaatgccctgagatgccgcaagctgatgaccggaccttgctgtcctgttcttgtcgttacaggctgccaatagctacctgcgagaccagtggttccattctctgcaatggaaggtaagtactgactcggttgcttgtttaaagcgactcaggcagtggtgcgatggcttaaagccaatctgtcacccagaggcatgaaagtggagaactcatgccttccagatggctcagctgaggaactttgttcccctacctaagagcccctggcccttcgtcctctgctgttcaattcctgtcccctgcagtgctgaaatagcattctcgccctggtgttctcaaaccctatagctgttttcctgcttcaaaaggatcatagaactgcttgctctcagagtgagggcgaccctgaggggagtccagccggggaggctggacttcaggggctcaagatgcttagttgaaagtaacttccaaaggctgtgccaagtgtaaacttaacagagattcaaaatcctgagccctatttctgtagtcttcactgattttcagttgtcggattctgtggcctaattttctgattctggctctacataggatggttcagagctttctggcacataaagggaacttcatcttcttggagacccaggggcagatcttctaagaggggtcccccagccacccgaggagcctgagttgtgccccatggctcaggcgatggaaaccttgacgtcaggaccagggcgtgaagcacgtacagtcagcttctcattcctgccctgcctccctgtctctccttgtcttctgatcttctggtttagaacaagctttgacaggcccctggccccacagcgggtatggctggaatgaccagtgtgtcataagctgtcatccttacagtaagctggggagccacaggggatgaacagctggccccatgcagagctgggtgccatgtcacgtgttgggaggacccagggaacactcaggattcctctcatggctccagaggggctcccccaacggccagggttgggggcagaaaggcaaccccagataattactttcctggtcccagagagggccactcccctcctttcctctgtcagctactggtcctcttgctttgtgctgtggggccaagtctcagaagctgagctgagtctccacgttgggttgcaaaggggaagagaactagtgtttactgagcttctactgtgtgccaggactggcgtgttttgagctcctactgtgtgccaggagctctgctagtctcatcatgtccatttcaccctcaccacaaccgcataaggttgatgattatcgttgttgccattttccatacgggaaagatgaggctcagactggagtccaagctcccatcgttaggaaggggctgaggcagggctcagctcgacctttccagtacctgtatgtactggaaatttctgaatgtagtagagtgggaaggcatagatgtcagccaagcaggtaaggtggtgcacacctgctcgtgtgatcagcaggtgctactgagagctctgtatccactgggagaacatctctgatgcctgggtctctctttgtgcccgggtacgagtgtgtctgaagacaggcgggacattcgtcagcacctactggggaccgtctgggggtcagatgccaaagcagttgagagggaggactgagcggtgttggtcacgggggtaccacctcttcccttccccatggtgttttacttgtggggcctcagaaagtgacagccttgcattttctcttagctcaggacacggcagaatgtacttggagacacactgcctacccgacaggttgggggaaaaatgccttatttaaaaggaggccaagatgagtatcaatgaaggctgtcaggtgcggtatcccacaaggctctgttttctgcctttccctggtccacattttcaacagtgacttacacgtgcacctggaaggcagcatttgtgaaatctgtgagtattgcacagctgcaaggggcaaccaacatgatgggcatagaaatggacttcaggaggctttggctagaaagatgatttaaaagctcggccttgaaacattcaaatgtcaaggattggccaggtgtggtggctcatgcctgtaatcccaacactttgggaggccaaagcaggcgggtagtctaactcaggagttcaagaccagcctgggcagcatggcaaaatgccatctgtaccaaaaatacaaaaaattagccgggcgtagtggtgcgcccatgtggtcccagctacttgggaggctgaggtgggaggatcacttgagcccaggagatggaggttgtagtgagccaagattggtccactgcactccaacctgagtgatagagtgagacccccatgccccaccccaaaaatgttaaggtttgcatgtgggattcagacagttgattgagcaagtccagaactgggatcactgtgtttctagcagctctcatgaagacctggatgtttgcattcaattatggtggcatccggtttatttatggttgctaaatttaatcaagcagtttaaaaaattttcagaaaacctaaatcaggatgtcaaggaactggcagatgcctgggtgtgtgctggcccacttgccaggtgatcaatggtagtctttgctctcagggtgtaagctttggctgtgtctacagcatgcttcagacacagtgtttctccttggacaattgccccccaataatttaggtatgctgccaccaggtggcagtgatatttcagtgttggcaacttgatctcaattcctgtggctctttgtacccagttttggtgatatttgagaaggcatgctctccttccttttaaaatggcaaagaaacgtaaggtgttttggaggtaccgccagctagccaaattagctgggaaacgtgaatttggatcctggttctgtgggcagattccagaaagtgttcacctaatacagatgcagttactgagtacatgtgagatgccagggctggctaggtcatttctggttcattgtcgttaagcaggtaatagaaccaaggctcagagagatcaagtgacttgcctacagttgcccagcagatttcaatccagatctgtggggctgtcctacctcctccttgatcacaccgtgcttttctctgagattgggactccacagccctcccaggacataacccctctgcttctgctgatacagccactctctctcccctctttatttacaaccacctatttgaggtttttctttttcttttccttccttgtttcttttctcttttctctgtctttaactgaaaaaaaaaaaaaatcagtggaacatcaaaattgaggacctttagaaattccaccacctcagcttgaattttttaactctcttttgtttttattattatactttaagttttagggtacgtgtgcacaacgtgcaggtttgttacatatgtatatatgtgccatgttggtgtgctgcacccattaacttgtcatttaacgttaggtatatctcctaatgctatcttgtttttgtcattttctctcctacaccaatatacatttgtctcctgtggctgcggtgcacatactgtcagaatacgttctcctgtatgtaaagaatgccacttccagcctgggcgaaagtgcgagactccgtctcaaaaaaaaaaaaaaaaaatgccacctcctaaatactgtgtccccattgcttagttttgatcaagttggacttgcatctctaggccattcccaacaggggcagcatcacccctaatgggaccaaaattggttccttgacacttaaacaaatcttaatgattacaatagtctgtggccctccaaagctcgaccctattcaatgaaatcttattcttgagtatttcttccaaagggaggacagatgagggagacactagggttccttatggggacagtcatgataacagggtcgattgacaaccgctgctatggaattgacctcaaattgttttgtggaagaaggcaaatatccaggtcatcttggtcacgcttttccgtctgggtaacagtgttgtttttgtggcatcagctcagaactttgagctgttcacacacggttgtagctcccatgttggaggagtttgctcggcaatggacactgcattttgtgaattacttcctctcactgaataggttctgttcttatcaacatttgcagatggggaaacctgagtgtagagaggataagtcagtcgcacaaggttccaaggccaccaagaaggcaagcgggattagaccctgaacatctttgcctctttctctgagcagctctgctcttcctcccagccctcccggcctggcctctgccatgttggtctgggagatctgaggaggcctggagcctgcaggaggagggccaggatctcccagcccatggctgctccacctcccagcattcgctagagcagaagctgcagtcctgagggcccctggggaggccagccctgtttggtttgggtggttcagcccttgaggctaattcccaggggtgtggaagcattaaatagttattctgggttaatgaggcttcatttctgactcagatgtacctcctggctcatgccctggccctcagaggccaagccctgtggtgacaggcctgtctgcacatgaggctgtgagggcacaggcctgtgtgcacacgaggccatgaaggcccagtctgtggggcaaggccaagagcgtgttcaggctgtgaggggaccgtgtgtgtttacaaagcattgagaagattggcctgtttctgtgtccagggtttcaaggtgagagacccaggtatgcacagctgtgagggacaagtctgtccatgtgaacaggcccaggtgacaggtccaggctactgggctgtgaggagacacacaccaggctcctagaggagccccgagaagccaggatgcacctgctatgggagctggagctcctggtgcctctccaccttctcgcttcctgagaggggttcctcaggccgaggcacactagtcctggaaaccaagatggtttttccccaggggaagtgaggtcactcagaacagccccaggggccaagccccagagccggggaccaatgagcagactgtgtgtcacaagaagctggcctgtattcctgtcccagggctgccagggccagaggagtgcccttggctctgggaaaatcccagcccagctttggatcctttctggctgcctgccctggccacgctgccttcttcttgctgggcaggtttcccagccccctagggtggccacagcccctcgatcaccgcatccaggcccaggcctctgtccctcctctgtggagaaaggtggaaaagaatgtggggtgtgtgagtgtgagagtgagtgtgtgtgcgcgtgagaatgtgtgtaagagtgaatgtgtgagtgtgtgtgagagcgagagtgactgagtgtgactgtgtgttgtgtggggtgactattttatgagtgtggtgaggtgactggtgtgtctgtgtgtggtgtgtgaggtgactgttttgagtatgtgtggtgactattttatgagtgtgtgtggcgtgtggggtgactatgagtgtgtgtggggtgtgggatgactatcttatgagtgtgtgtgtgtatgtgtggcatgtggggtgacttttatgaatgtgtggggtgactgagcatgtgtgtgtgtggtgtgtggggtgactatgggtgtgcatgtgtgtgtggtgtgtgggtggcttatgagtgtgtgagtggtgtgtggggtgacggtgtgcgtgtgtgtgtggtgtgtgggtggcttatgagtgtgtgtgtgtggtgtgtggggtgactatttgtgtgtatatgtggcatgtggggtcatttgtatgagggtgtgtggtgtggggagattattttatgacagtgggtgtgggtgtgtgtgtggtgtgtggagtgacagagagagagagagtgtgtgtgtgtgtgtgtgtgtgtgtgtggggtgcatatggggtgactattttatgagtgtgtgtgtgtgtcctgtggggtaactattttatgtgtgtgtgtgtggcctgtggggtgactattttatgtgtgtgtttgtgtatgtgtggtgtgtgggggtgactgagtgtgtgtgtggcatatggggcgactattttatgaatgtgtgtgtgtgtggcctgtagggtgactgttttatgagtatgtgtgcatggcatgtgaggtgactgttttatgtgtgtgtttgtgtatgtgtggtgtgtgggggtgactgtgagagtgtgtgtgtggtgtgtgtgtggcatatgggccaactattttatgaatgtgtgtgtgtgtggcctgtagggtgactattttatgagtgtgtgtgtgtggcatgtgggatgactgttttatgtgtgtgtgagtgtgtgtgtggcctgtggggatactatgagtatgctggtttggagtgtgtttctttgggcctcagttttctcctctgtggaatggggatgatcatggcgtctcgtcactgggccgtgtgaggatcgaaggctgtgttgtttgtgcagcaggcagaagggatcctggtaggagcccacgcgtgggagcctctcatgcgccatcatcagtgtctccaagtgggtccgacatggtgggagcagctggctcggcctgtctccctggcagccccttccagcctccacaggtggtcccggctgactcatggcctgggagggctagggtgggtgggaagcccgccctcgagactgtctctgcccggctctggccacggagtgtcccctgtgtccagcactatgtgcccctgtgctcctgagtccggaaacagttctgtggggtccacatccctcccccatctcatagcagaggggactgagcgtccaagtggataaaggatgaggataaaggaccgtgccaaagccagatgcctcccagcgagggtcacaatctcgcttccacctcatgagtggctgcggcgcctcgggaatgagtctgttccatgttctgtgttgggagctggcgctgggggaccacaaccctcaaagtccccagcaccaaggcaaagtgcctggggctcagagaggggaagcccacctgacgggaagctgagggcagggcctgggtcatgtccccactggctgcaccctcaggagggcgggatccatcaccctcatccccatgcaggggaaaggcccaggggaccaggtcagaatgacacagagcccttgagctgatgcctcccctgacccctcactgagggccatgctagaaggggggatccctacaaaaggggaaatcctgaggctctggaccgggcctccagtaggggctgtcacccctggctctgaccttgctcccggagcccacctcccctgggtcgcctcctggtcatgggagcctccctggggaagagccactcctagtgtcctagagatgtggccccaggcgctttctccaccaggctgcaaatcccttcccaagctcacatcccccaagtcgtcatccagcccaagccgagcccccagttgcaccccaaggccttagcacaaggctgcagctggtcctcgagccatgatggacacttaactcctgtcccatgcatgtgccagtgcctcacttactcaccttggtgaatccttacagccctgaggaggtgcctgttcctcctcttctccctttttactgatgtggaaactgaggctgaggttaaatcactcactcaaggtcacacagctgttcaatggcttagatgggatttgaacagaagtctgagtgagtccagaacctgggacttcagccaccgggagtgtggctcccaactgtacatgcatgcatgtacacagacacacgctacccagacacttctcacacctgatgtgcacttgggagcagtgccccggctcccacctgttctcgtggcacatctgggtagagcctgggtgttgctggtgcctgaggcttgcgtgagagctttccacttttccctaagtctcccatcaccactagggttatgtgaattggctgcgcgtgatggctcatacctgtaatcccagcactttcggaggccgaggcgggaggatcacttgaggtcaggagttcgagaccagcctggccaacatggggaaaccctgtctctactaaaaatacaaaaattagctgggcgtggtggctcaggcctatagtcccagctactcaggaggctgaagcatgagaatcgcttgaacccgggaggcggaggttgcagtgagccgagatggtgccactatactccagcctgggtgacagagtgaaactgtgcttaaaaaaaaaaaaaaaaaaaaaaaaaaaaaaaagataatgtgaattgacgtctgactaggcaggcccctgtttctcacgcagaagggctgattgcctcatcctgtcttgcacgtcatcagcacagccgctgtcagaccacctctcccaggcccggtgtcacactcaggactgacccgcttccacatcttccccaaacacactggtcgctgtgtcccctgactttaaacttgaggtttggaagcccagatctggccttgcacctgactccctcactctatacagtgaccctccgaggtggctcctggctgggcctgtcccctctagcccagctcatcccttggtcttgagggaagacgttgcccttgaaccccaccccacctccgtttgcccgtctaaccccgtcttggccaccttcctccctctctgtctccttttcgacctttttacgatcacttcaaggtcagcacccccagctcctgccagttatgaccttgcagttctcctccgaggctgcgtccatcttcacgcagccattttagcagctgtggccaggcacatggacagtcctgtgagcctcgccaaggcatggcagctcagacatcccagtgccgtgccacagcgcccaagggaggcttcctaatggctgcagaatcgtccgtgaagaggctggggccatttaccaaaggcctctgctgtggttgcccttcgggtcgttcccagctttcctcagttatagataacgcagccatgaccgtcgtgtatctcagctttcgctttatttgagttacttgtttagggcagatttctagaagtggttactgggccagagaggaggggtatttttaggtggctctcaccacctattacctatttgctcccaaaataatactttctgcagcgcttcagggccagactgcccaggttccaaccctgatccacttcctgctggctgtgtgaccctggaccagttgctttcgtctctgggcctcttgagtcaaatgaaaccaagctcaccagtttcttacggggattaaatgggttcacagctgttcagtatttagaatagcacctgccatgtggtacccactcagaacattcattcttcttctctgatctacaaggacacagaggaaaacaggctcttggtgtcggaggatgctaggagacggggctgcagaagacggaggcacatgtgtggcacgcaggccaccgactcatgagcccagggcgggcatcacccatcagccaccgcatgctttgccctgaggcagagctcttctcaacatagcccctgcctggccacccagttgacagaggcagtgacagtgtcccccgtcctgcttgagtgaccgcccaggcctatggggcgagtgctcctggaggccgggtcagtgccactggctctggctgtgcctccgtggggttttctcacagaagcttctgtggaacttccaggcaggcaccgtgggtccattcttggagggtcctaccctccgagaaggaaggcagaatggtggggaggcaaggatgggcgggagtcggccttgatccccttccaggcccagccacctgcctgcttcatccaggttgaaaaggcaggaattctatccagattaatttctggcactcagtcaaagagggctttgtgacctcttaagaggggatcaaagggattcagtggagaactgtgaaaggaggggctttccccagaggcagggggcccagcccactccaagactgcaggaggggccctcagtgggaggtgcagctggtgagtccagcctggcagcctctttgtgcacgtgttcaatccaaatgggaaaccttttggggccaggctgccagtcccccgcgagggccacagtctccagcatctcccagccacagcccaagccccacagtgggtcatcagggaccccataactagtaaccagggctgcttcagggattgaaactaacaagtggcagagggccgggagcattgggaaagagagctcatgtctcgcaggctttcgttacagtagagggagagaaaaacaattactaggcacctactagggtcgggagctctgctggggacttctcaaaatttggttaggcctgtcttgaagcaggagctgaggaagcagagaggcacgtccaggatcacacagctagagacaggcagggctgtgaattgaacccaggggacaggaggaggatgggccttttggcctcttccgttggagcccacagagctgccactttgcccagctggagctatctttggaagagacacaggacgttttcgaaataaacttctcattgaaggataaaatacatctagaaaagggtacaaatcaaaaagagttaccattcacctgggcccctcctccccaccatgggcagccactgctatcctgacttctagcagcacaggtgagctttgcatatacttgaactttatctaaatggactcagacaccctgaactcttttgagactggcttcttatgatttgtctgtgttgtgtgtagcagcagtttgtctattcactttgctgggtggtgttctgttgtctggttagactctgttaacttgttcattctgtggataggtctttccagtttggggctgttacgaatagaccattgtaaacactctagtgtacatcttttggtgaatgtgtgtccacagtcctgttgcgtatatgcctgggagctgaattatcattcgttgatgctgccctgcagttttgcaaagtggttgcaccagtgtatacttgcaccagcagtgtgcaagagccctaagacacagagcatttaaaaactggcacttacgaagctttttaaaataccgaaaaggacaaagagaactaagaaaattcccactatccctaaatctctcttaacttcttttaaattgtaaaaaaatcaagctattacctacatgtgacaaaatgtgcatgccctaactgttgagtgtgagggagttctgactgctgtactcacctgagtaaccaccacctggatctccgtcacccagaagatctcctcgcgcccctttccagccagttccttgtcctgccagatatcccctgcgaacatttaacaaaaataaaatgcacgtacataggtggtagtcctaaaaagtatagaaaggtataaaatgaaaagttggcctctactccttcaagtccattttcccctaggcagtcactgttagcagctgcacggggcttctcagaaagtgcttatgaatattcctttgtaaacaccacgcagactttatcatccacgcggttccgttccatgctccttaatatatgtcgcagcagtgtctgcagtagcacacaaatccacaccattttcttttctagtttcatagtcttcccttcaggcagagtttaaggtggatggaactttagatcctttaggaaaatgctgtcatccacatagggagactgagtttctgacaggaaggagaggtttattgagcatctactatccacaggccagaggcagtacaaggcggtttgctgcccaggcctcgcagccccccaacacggaagcctgtaagcacactccagggaccagggtggagtgagctgcccctggctacagagctgggaggtggaggtcctaggtttgcaccatgtgcctgggtcaccgagccttcccttgcactcccctgtccctggccagggcttcctcaactctacataagggccagccttgggctttgggacattcaagacacccccacccccaccttctgggtaaaggtctttcctgagcctcagaaatgacgcattacagtggcttcccaaactgcgaaggaagaagtggcgtttgtgggttgtcatcgtttctttgggcaaggaaggggggacccgagcgttcgtgtgtcatccagcgcaggctttgatgaggctgatgagtcatggagccatacaaggaagtttttcatgtaaacggtttgtgggtgaacttgttttttgccctttaaggcagaattttgtttttctttttctcgccctttaaagacaagtttttaaaacgtaaatgagaggcagcgtcttgatgagcaagatcttttgttctgcaggcgtctgcagtgtgtctctttcacagccagtggtgggcagtggaggcccctgagctgggttgctgatctgcacttggggcacaccttggccaggtgtccagcctggaagagggaggtggcctgccattcttttgttggcctccagggctcccacctgctggcctgttggctcggagatgaggccaaacagagactttaaaaagagcagtgcttgtccccacagaggaattaggcccttgcttcaccgagggatcatcagaaaatacccagcgggacagccggctaactctggaagggaaggtgtttgggagagaggataattgaccgggagatgatgcagaacgactagggccctgagggctgttgcccacattctgctcgccggagcaccctggtgcactttcagaaccaacagactgttttgcagaaagccttgagagggacagagaccccctttcagagaaactgaggccactcctaatggagcttgctggcacgtggcagcagaaggccagggtggtttgtttccagcgggggctggcacatgcttggaccattccctttggaaaactgggctgaacctgacctctgtccaggagtacaaggaccttagaaagcacaccccagaggtcggggccagcctgacaccggctggaggcaggaacagactcaggcagaccattcatcatgtctgttgacttttgagacttttgttaaagtctgcaaccaatcttccatccaagagggtccttatcatcccaggcctcctggcactgcagacccagggattttgaaccggtagctcagtggttttcagagtgaagtcccaagactagcagtatctgcatcacctgggaactctctagaaatgccagtcttcagtttcacaaactctgaggtggcaggatgagagcagcaaactattttaacataccctccgggtgactgtgatgcaccccagcgtttgagaaccactgcagtagtgtgaagaaaggggaaagaacaataaacatctattgagtgcctactgttttccatctactttattttcattattttctttaggctgcacagtgtccctgggttttatatctccattgtatgaacacgagtctgactctcagattaaccttctcatgcatccaagctggaattcaaacccagagtctgctgcctccttctgtaaccatttcaccttcttactgggtttctcatagcctgagatcaagcatggatgactaaacgtgtccatagctttcgggttactctgccagaatcccctctgtttgtgcaggtcacttagaattcactgtggtgaacaccattgaactcactcctaggacgctgagcttctctgggtgagtagagtctgccgcacgagtgtctgaggagccgcctccccagggagggcaggagtgcgccttctcctatattcaagcatgacagcattacctggcttgaaactcacattagagacttactgaacattaatttattaaagaacaggatccttctccaggattctcataagttaaagccctttgtagtaggcgccggtgactcccacccagaggatgcagctgggaaggatggaggcttccaaacaaagccatgaacagatcagatgtcctttgaagtgctgcaagcactagataaagttcttagtgaaataaacaacagaggcccctgttgagatgctaccgtcttgaggcctggcaagggaaatccttatttgggatagagagagttccctttatcaggcccaaaggaaacagagcctgtggtgtccctcactgtatttcggaagggctaggaaactcgcctggggctgcccgcctcccacaccacagaggaagagcaggctctggtacagtatttgcatttttttatttatttggtgggttgcaattaagcagcgttgtttcctgaaatgccctgaaaatgccaccttatattaatgattaataagaggtgttccccacccccaccccgtagtctttaatgttgagtgcaaattgctttttcgctctgggtggccttggtcaagaggggagggccaattactgaggttcagaaggccaagctggtggccctgtcagaaagaccctcaggagggttggcacacaggacagagtcagggggaaggatttggtcggcttcattttaattttttaaaggtatatcctacctctgcttaatgacccttgaagtggcttagaaaagcacacagactgggaaaatcgatacgaattgatctggagtgacacccaccaggtgttaggagggaaaagccagatgcagacataagtattatgcagtgccatttgtgtaaaatgaaatgaggaccccacaaaacctgtctgtatcgtgttggtgcaaaagtaattgcagtttttgccgttgaaagtctgctgccagacaaatatatatttgtatttgattatccgtgaccatggagaaagagatgaaatgatagacgtcaagcgtctgcaaacgatctggcccagcacctgtttttataaataaggagttttcagggtggcggggacagctctgcccatttgggggagggggggacagctctgcccattcctgctgtggcattaagctggtgacaacagaggtggcatgacccacaaagcctggactattattatttggctcttaggaaaatggtttgtggaccccgatatataacatagtctcaaattttcggggtttacatggtgagcatggagttagcatggattcagggggtggcgggagggagggccgtggtaaggttaaaaagaagaaagccagcatgtatgatgcagctgaaacttaggtgcagttttaaattgggctggttgtgtgtttgtgtgtgtgagtgtgtgtgtaactgggttgtgggtgtgtgtgtgcaccatgatacaggtgtgcgggccatgagccttccatgctggagttcttgtcctctgtatgaatttttcaaagaacatgcacttgaaaaatcggattatccatctactagaccactgaaaagtcaaaagtagtaagatctcagatgccttccagttctctttaagaatatgggattctggcccggtgtggtggctcgtgcctgtaatcccagcactttgggaggctgaggcaggtggctcacctgaggtcaggagttcaagaccagcctggtcaatgtggtgaagccccatctctactaataatacaaattagctaggcgtggtggcaggcgcccgtaatcccagctactagggaggctgaggcatgagaatcgcttgaacccagggggcagaggttgcagtgagccaagattgcgccactgcattccagcctgggttacagagtgaaacttcgtctcaaaaaaaaaaaaaaaaaaaaagtatggcattctgactaatttaagaatcctggggaaagatacaatatcaccgtcatgattccaatttctgaaatctttggagagttttttcctttatttctctttaattaaatgcacaatgcatgaacggcttcctgcaataatttgaaacattgcagataaagctgagccctacccgttggtcctcccccgagccacttccgtctccaaagaagacagctgtcaccagccggacttggtccccaccccccaccccctgaagccccgtgaattagatcatatatatgtgtatgtcaacatagattatgcatgtatttgctactgtacttaacagcatgttgtgcaggtggaatccacggcagatcttgtaaccctccttccttctttttaactgctgtttgctgttgcactgtgggggccacagtgtaagcacttctctattgatggacatttagggggtttctggtcaccttttttattttttttgagacagagtttcgctcttgttgcccatgctggagtgcagtggcacaatcttggctcactgcaacctctgcctcctgggttcaagcatttctcctgccccagcctcccaagtagctgggattacaggtgcgtgccaccatgcccagctaatttttttgtatttttagtagagacggggtttcatcatgttggccaggctggtcttgaactgctgacctcaggtgatacacctgcctcggccacctgaagtgctgggattacaggtgtgagccacggtgcccagctggtcacctttattttttctaagacattaactgtctttagtcagtgtcctactgaactcaataggtgtcatttatcaagcctgaaatgtgacatttaattctcccaatagctccaggatgcaaatgctactattatccccattttacagatgaggaaactaaggttcagagaggtgatgtagtttgcctaaggctgcacagctcataagaagcggaaaagaaattcaagtgtagatctgcccgactctccgtttgtgatgatgcacacatctgcgagcaaaaacatggcttgcttgagcctctgagctcccaggagtgtgcaggctggtgggggaggcagctggcccataggtcgtagagtgagcaaagagtgatgagggtagtaagttggcatgctgagcatggggctgggacctgccagcctccctggcgcaacagaaattcatttctcatggttctagaggccaggaagtccaccatcaaggtagattggtgagggctcgctccctgcgtcacagagggtgccttctcgctgtgtctcacatgggaaggggtgagggagctcccccaagcctcttttctaagggcactgatcccattggtgagggctccaccctcatgaactaatcacccccacgaggccccacctcctaacaccccccccactggggattaggtttcaataatgaattttttgaagatacaaacattcagagcttagcacttggcttgtggccccctcactccggtgtctgcctccatggtcacatggcctgcgcctcctctgtctctcctttgtatacttcctggggatactcgtcactggattcaggacccaccagataatccagcgtgatctccccatctcaagatcccaaacgtgggatgttgcattcacagatggcaggggttgatgtggacataccttctttggggccaccagtcacctcatgacccaggcaggagtttgcctctcttagtgaatgtgtctccgggcacagccctccccccagagcatcttgacacaggaatgagcagaagaaaatcccacagctcttggcccacccccacctgcacgggactctctgaggggatggtgcctgggatttgattaaggaaccctgagaaactggtcgtatccttatcaaggccagagcataacacgcccgaggcgacgctccttattgtcccttctgtcacctctcatccctccccttgtccctttcctctcccccctctcccttctccttggagaagaacccggcagcttctgcctgcacctgagaatgttttcccctctttccctctttctatagcctgttcaaaatcttaacttaaaacctgctgaactgggtgttcctgccccagttcagcctcctgtgggaatgagggaggtgcctcctgtccgcacagcctctggtcagcctgagagcagggaatccaggaggacaggaggggcgggcaggctgtgttgagttttagaattctgaaagaggggcgcctgttctagtccatgaggaaatgcacttctccaggcccaccccacacccggcccacccgtgcaggctgtttttccactgcactcagttttcctggagaaacagcccccgccgggattaggaccgtgtgaagatcagagagcctttccagaatgccgagggagagtccaggattgttcctgtgtgtgtggctcagtcccttcaaggaccggagctcaggaccagggggtgaccctgagccagaatcctggttcctacagggccggctgtgacctggagtgggttaccttttcctctgtgtgttgtggtcttcaagtctgtagaatgggggtcgcacctgttaaccccggctgcaccacattcagatcacctggagatcttaaatattctcttgtttagttcggtgaaatatgcatgaggcatcatttgaaccaggtttaggtggcagttcagtggttcattcacgttgccgtgctgctgtcaccaccatccgtctccagaactttctcctcttcccaaatggaaactctgtccccattaccccctcccccagcccctggcatccaccattctgctttcggtctctaagaatttgtctactctagggacctcatatgcgtggaatcacacaagatttggccttttgtggctgccttatctcagcctaatgtccccaaggttcattcatagtgtggcctgcgtcaggatttccttcctttttaagacagaataatgctgcagtgaatgggtagaccacaccttatgtctctctttatccattggtggacctgggttgcttctgccttttggctgttacgaatgacgctgctgtgaacatgggtgtgcaaatgcacttttaaatataccggcgctcaaaaaagtcctgatgcataggttctgcctgcccccaacaccagtctgatgggattgtcctgaggttggactccgttattggaattctaagccccttgggtggttttaatgtgtagccagggtcaagaaccctgcctgatagagtcatttggggcacacctcagcacagggcccagtacataggaagcccggggatgttagctggtgtgatggtggctgctggtgtcggctgatgtacagctttgtgtgagaggacagcttggggccggaatcctcccccatggctcctctttgccagggaccctgtgcgagccccatgctgacgtccctacccgaattctcctggaagttcctcctgtagcctcctgggtccccaggtggctccctctgacctcactgatgatgcaggtgcccaggtgtgccgtttctgacgcagggcagggccagggcttatgcaatcgggtaatgggctggaggcgggccttagggtggaagtcagtgtttctgtcccctgctgcagcaagagcaggataggacatcaggcccccccccccccaattccccagggaaagaaaacccaaccaattccaaacccagctcccactttctcaaccacagttgcagagggccctgctgccttctgtgaaatgatggggctggacggctcagctcgagtcaccgcagtaagatggcagactgactgggaccaggcgtcctggggtcagtccttgcttgctccttacagctgtctgggcttccaacagctgctatgacaaatttccgtaaactgtgttgcttaaaacaacagaaatttgttctcacacaattctggggccagatgtccaaaatcaaggtgtcagcagggccacattgcttctgagactctaggggagggccttttccttgcctcacccagcttctgatggtgtccggctatccttgatgcgccttggcatccaggctctgcctccatacgtggaggtctctctggagcatgtgtgtgtgtgtgtgtgtgtgtgtgtgtgtgtctctctctctctccacatggcctttttataacgacgccagtcactggatttagggccaactctaatccagtatgacctcatcttaattatatctgcgaagaccccatttccaaagaaggtcatagtcacagataccgggcttaggacttggacatatgttttgggcagacacagtccaacccacaacaccagctgtgtgacctgggcaaggtgtgagcccctcctctcctctgcagcacgtccaccatgaaatgaggcttgtgggtgagaaccttgcttcttagagggctcaggaacatctgtgtcacctggaagctgcttaatgcagattcccaggcctcgcccagctctgctgagctggaatctgcatggtaaccagacccccaggcaattcctgtgcacacgaatgagagttgcagggtaggtgaaaggatttggtgcagggcctggcctaaagcagcacctaacgcatgttagccttcagtgccattttcattctccccactgcctgttctacctgcaacaaacaccgagagcaccttccctgggtggctgcagtcaccatccaacacatcggaggaacagatgagatgtcatccctgctcccaagcagctcctagctcagcgaggaaaacagctacatacaattttttttttaatgtgctcaaacagcatctgcgtgatgattggattttgcccacggtgcagctggcctgaagagccaggtaggatgtggtactcagctgggagcctgacaccaaggccagcttatctccttgccagccaggcacgtggttacctaggcaaccagccgatgccgcagagacagtggagcaggacacccgcctgagttcccgctgtttccctggaagcggcattgagcacaggaggccaccaccggtgggcatttaggcgttttcccctcttgcaaacaaattgcccatctccccaggagctggcttttcaggcaggtgtccactgggcacccagctgcaccagcctgcaactgcctttgggaaaccgaggaggcgaggctcaactctccgatttgaaggcagcagaatcattgatcaaggcatagaggtgctcaggtttgcctctcggagtggcatgatggtcaggtgctcaggatccagagctagacctggatcccaattctgcctagctcttagtagctgcatgacttacctcactcagcctcgatgttctcatctgtaaaatgggacttacattataccactcacctcatttagtggatgggatgatttaaaatgtatttatacaaagtgcttcgcacaggacctggcctatggagtgcccttcagaagcgatggcttttccgctgtcttgtcactcgtcattcatcagaacccagtgtgcgtgcttgctgttcttggaaaatgtcagcccttgatatgtagtagccattatgactgtaatgagtagtttggttagaatgttctgtgccctgtctcacccttcagccagactgggagtgtgcaggggctggtttgtctcatctctgtatcatttcccccactccctgcccctccatagagacagtgccccactcagagtaggcgtccctccacccaccttgaaaacatgagtcctgaagggtaagcattgattaattcatcaatgaattagttggaccagcaggtaacagagttcagtaattgtgtggggtaaattggggtcccctaaaagaccccttacaccctgtgctgtcctgtggcaaaatttaaactgattcagtgcagttgaggcacggggacagggcaaaaagcaacaatatatgtgcatagcagcactattcatgatagcctacggtggagacaacccaagagttcatcagcggattaacaaagaaattgcagtgtatctgccgggcgcggtggctctcctgaggtcaggagttcgagaccagcctggtcaacatggcgaaaccctgtctctactaaaaatataaaacttagccaggcgtggtggcgggcgcctgtagtcccagctactcgggaggcggaggcaggagaatcgcttgaacccgggaggcggagtttgcaatgagttgagatcgcaccactgcactccagcctgggtaacagagtgagactccatctcgcaaaaaaaagaaagaaagaaattgcagcgtatccatgcagtggactgttagtcatggaagggggtgaagcaaagctgccacagccggatgaaccttgaggacggtatgctaagtggacagaaggccacattgtgtatgatttatatgcagtggaagacacatgttaacccacaacagttttggcagacacagttccacccacaacacaagctatgtgacctgcgcaaggtatgaacctctcctctcctctgtaacacgtccacctcgtggaggagaggaagtgaggcatgtgggtgagaaccttgctgcttagagggctcaaggacatctgtctcacctggaagctgctgaatgcagattcccaggcctcactgtggtcacaaaaggacacatagtgtatgattccatttatatgcaatgttcagaataggggaatccaggaacagaaagtggattggtagttgcccaggggctgggggagagtacaataggaagtaacagcttaaaagggtttccttggaagtgatggagaagtgttggaaatagtggtggtggttacacaacactgtgctaaacgccgctgaagtgttcactgtaaatgggtacatggtggccgggcgcagtggctcacacctgtaatcctagcactttaggaggccaaggcgggcagatcatctgaggtcaggagttcgagaccagcctggccaacatggtgtgaaaccccatctctactaaaaatacaaaaattagccgggtgtggtggtgggcgcctataatcccagctgctgggaaggctgaggcaggagaatcacttgaacccagaaggcaaaggttgcagtgagccgaggtcatgccactgcctgggtgacagagcgagactctgtctcaataagtaagtaaataaataaataaataaggttaatggttaattttatggtgtgtggattttacctcaatgaagtaaatctatatgtatgtgtatatagtgatggcagccccctggtgcctcagacagcctagtttctcaggccagagtgatgggctgtgactggtaaagcccctgtgtgattcccggaggcactagggttgtccctaccaagcctggggcaagaaaggaatcccagtcagagagaaaaaaaatagtgttcagtctaatcccagaagcaccgttgaccctatagccctgacctgtaatgaaaacgaacgaaacatgcatttacaatatttctttaaaaatgagattttgggggtctcactttctagttaagttgagtgtcttctcgttattttatactccacaattagatcacagatgccctccagtcatggtggtgctggtgcccatgtatttcactggaaatgtgcacagataatcgggacagtgttgcctccttccctggaaaattgtagccaaagcaccgaggctgattttgtgacatggattgtgtgggctagcaggcatggggaataaggccagggggctgtgtttgacccagggtgtctctgtggggagtgcaccagcagggagctgagaggttatgagcgggttttaggttgatgttgaagacttggcggccaaaagggcagtttgggggtaacacccatgggacagttatgaggcctgcattatatatgaaggtaatgtgacagtctctgatgctcaccggattgaagggaagctattctggaggactcaagaaggccaaaaatgctgcctcccaagtgtccagtcctcccggaagccatggcttgctggagatagcaaattatttcctacacacttagcatctgcagccatagtgagtcttgaatcagggaagccagggaagataaccagccagccattgtccccgggtgtgcaaggcacaagtggggacattgcaccttggtagaccttttaagaaaattccaaggcagggtcccagtgagatgggggcttggagaggggggtctcccatgggaggaggtaggcaagggccctttcctcgggccgaacgcagtgccacacacatactagacctcagcatcgatgggtagaggcaaacatgcatgctcctgggcccgtggggacgtgatgacagggacaccaagactttcggatagcactgcccgacggagcattctgcgatgatgaaaatgttctctgtctgcaccactatagtcaccactagacacagctggctaccgagtaactgtaatgttacgatgtgatcaagatgctggatttgtagttgtatttcattttaatgaagttcagtgtgcgtagccacctggggctggtagcttctggactaggcagctccgctgtaggacctgcactggaaaaagttttcaaagccgggctgggtcctccctggctcatatttccctgtggggtcctcctccactctgcagtgccatgggcgcgcccgtgcagcgtcctctcttcacgacaggtggtggggagcatgcgtgcttgggtgtgtacgcgcgcgagccccagaggctgcggcagcagcagagcagcagagcagcagcccctgcctggcgcgacgtgcttccagtgcattctgagtcactcctctcctggcaaggggcacattcctgctgacgacttgtctcccgtggaggagcaacaggctctgctttccctggcctgagaaccctggcatatgtgcttgcctctgctgacagttgccagagcgatggcaagtgttgcccaggtaacgtcccttccttgacaagcagagagggtgaggacagcgctggagtggctgactctgccagacgggaagcaggaggctctgcctgctgtctctgcttgccgctggctggtggggcttgggctcggatgtggggagccctcctgagttctacctccctggactactcctttacagaacttggtaggtgaaaacaatcagagctgctgtttagccaggaactgagctaagtgttttatatattatctcatgaaatagtcacagcaagcctttgacagtagttattcttatcctgatttgcagacaaggaaactggtgcaagtaatagactgtaagtttcatgagcaccggggcttgtctgctttgttcaccatggttatccttagtacttaacatagtgcttggcacgtcatagtagatcttcatgggatgattggatggaagggtgaatagatcgatgagtgagtgatggaagtatggatggtagatgggtgatgaatggatgatgaggtgggtgaaggatggatgggtgggtgggtggatagttgggtgggtggatagttgagagggtaggtgaatggttggatggataagtagatggatgaatgaatgagtggatggattaatggatggatgggtgggcgggtgggtggatggatggatggatggatggatggatgggtgggtggttgggcagatggatggatgtgtgggtgaatggtaggtgggtgagtagatgatggatgggtggatggatgaagtagagcttagatttgatctggagtctgctcgtgaagcctatacgcttcgccactgagccatactacctttggttttgtctgatgactacctccctaggatagcatttttaaaaaatagcattattgaaatggaatccacataccataaaattcacccactgtgagtacacaattcagtgatcttagtaaatttataaagttgtacagtcatcaccacaattcagttttagagcatttccaccatcttgaaagatgccctcatgcttgtttgcagtctcattcctgttctgtgccccaggcaatgaatgttccactttctgtctctgtgaaattgcctttctagacatttcacataagagaaatcatacactatgtctttcttatctggcttctttcccttagtgtagtggttatgagttgcatccgtcttgtagcatgtgggtaattcaatcctttttattgccaaatactgtttggttgaatggctataccacatcttgtttatccattcatcagttgatgaatttaagttgtttctgtgaagaatgctgctatggacattcttgggcatgtctttggagtttgtttctctttctcttgggtagatttctaggaacagaattgctgggtcatatgataaatttatgtataatgttttaagaaactttcaaacaattttccaaggtggctgtaccagtttaccttcccaccagcaacacacaagattcccagtttctccacacctttgccaacacttggcgttgtctgtcattttctattacagccatcctcgtaggacgaagtcgtatctctttatggttttagcttgcgttttcccgagggctaatgacgttgagcatcttctttgcatgcttactcctaggctggaatttgacttttaaagccagaccttggcaaactgttttctacaaagggccagatagcaaatatttggggctttgtgggccacattggatttctgttgcatattctgtgtttattttccgtcacaactcctacagtttgtgagaccattcttggtctcatcgaacaaaaacaggcagggggctgggtttcaccgcatgctatagttcaccaaccctgctctaagtcagcccctttctgtgaaaacaccaggtcgtgtgcccagccacagaacagttccaaggcccctgtgtactccccacttcagaagaatccagtggcctgtggggtccatgctagacaaaccaccaggccacccaccccacctggcaaagcgcactcagcaggaagaccatattgcaaagctgagggccagcctccagggagcctggagcagggattccggaggcgtccctatcccagctccaccatgattcatcacctgatgagctcatcagagttcctgggatgaggcatgctaatttgtcacctagggaggagggacagggccctgttgatcctggacaggcctccctcatccctgtggccaccctgacctggggctcagagcctcttctgggaacaggggcctgcctgcagcccgcacccacaacgccgtagcccaccctccccccgcacccgcagagccgtagcccaccctccccccgcacccgcagagccgtagcccaccctccccccacacccgcagagccgtagcccaccctccccccgcacccgcagagccgtagcccaccctccccctgctgcttccaccgccttctggttacctggcctccactctcagagccttgtggatcttgtttctggatcttgtccttgtgtcaccaagcattcttgacacttcttcaggatctcttggcaaatctgatatcctcttcacccgaccatcgtggccctcactgatgtgatggaaagagctttgcagtggccagagccagttttcattcctgaattgtccctttctagctgcttgactctgggcaagtctcttgacctctcggggccatgataggcttctgtgcacagagaacaccaacaatcctctggcagaagctgcagctggccaccccctcagcatcgcgtgagggctgccagctgtgcaccatgaacacctgtgaccctgcagagcgcatgcttttttctggctgtgggatcactttggcctgggcacacggcagtcagaagccctgaagagttggccaggcgcagtggctgccgcctgtaatcccagcactttgggaggccgaggcgggtggatcacgtgagatcaggagttcaagaccagcctggccaacatggtgaagcccatctctactaaaaatacaaaaattagctgggcatggtggtgcacacctgtaatcccagcttcttgggaggctgaggcaggagaatcacttgaacctgggaggtggagattatagtgagctgagatctcaccactacactccagcttgagtgacagagcaagactctgtctcagaaaaaaaaaaaaaaaaaaaaaaaaaaaaaaaaaaaagccctgaagagtttagggagctaatggacaaatggccagctccctcactctttaggaacgtcaactctgagtgtgatctgcactgtcccctagagcccccagcaggagtgagccctcattgcctatatcatgtgcttgacagtgccctgtttattgactgtcttctcttgcccgtctcacttccccactctccccaccagtatttcctgctgttccctctcagatcagtaagccatttgcactcagtcccttgtctcagggtcctccctatgacaagcccccaactcatgggatactgtgaggattgagtgggataaagctcataagagctagcactgtgctggcacatggtatgtcctcatgaaattttagcccttggtacaagccctgggatcttctggctctgaatacagcctctgcagactctcccatggatgcctgtgaggcaagggcttgggccctcccgggaaagctgttgtcctccccgctccaaggaggggagctgtggatgagctgaggctgggtgtaccgaccccgagggctcgtgtctgaaactgcgttggtgccagcgttgcccactgggccctgctatgcctcagactggttgcctctgcatcttgagtggcatctgtgtgtggagaacaggagattgtactcatggccacccacctcagggctggttgtattttgcaagtttaaatgagacttcgctggaatgatgttcaccaaatattaatggtggctatttctgggttgtgggatttttgaggccttttaaaacttatcctcttctttgtgcttttcagtacagtttagattttttgcaatgagcatgcatcatctttcgcaaaagaatgaagtcattaatctttcaaaagtaaataatgtgcagctgatcagaagagtccacttagagcccagactccatgcaaatgtaagacacgggtgtggatcgctgtggtttgctttggggcttgatatagggtggattttgtgagatcatttcatggtcttttaaaaattaaacaattctctgggtacaaactaaaaccacagactctgaggctcaaaggagcattcatcctctggagcgggtagggttcttgcttcagacatgttgggttttgcacagatatttcatcgtgctattcaggcagcgtgtcctgctcacagcactaggacagggcggctttggttgacagtaactaggaaggaggctggttatggttccagagacgcctcagtggactgggtgcgtctcatcgttaatgaagttcagccagtagtcactgtcaccatcgtcaacatcaactgcatgtttactcttcactgtacactcacccccgacaacttgtcacgcgtttcttcctgtcctcgtagggtctccaatggctggcaagtgaatgttcctggtctttcccctcccgctccctggggaatgctgggctgccctggcctcctctgctctgctgggcctatgagaagagctgatctctttctaattcttgatgtgcaatgggtgaatgggcaaagaatagtaagaccaggtgctggaaggaggaaagaaaggtgggcaggtgggtagatgaaagaactagagagaaggagaaagaaggagcagagagaggagaagggagagatgacgggaaagacttggggtgatgggcggggggaatgaaaaccgtctttggtgtgagttcatgggggcgacaccagtggcaatgagtatatcagaggccccagaaaatcatggggtgcgggaaaataatggagaggaggaagatgggatgccgtattggcctaggttttacgtttcatctccttcagtttttcaagagacagattcagtctcagcgttcctttttgtgactcttggctgatttatctggacttgacttttgaatgcggctccatagagtggaccacatgggtccaggatgggtcagggttacagattgaaagaggtgccggtattttccatcctgacttacagaacaggaccctaaggctcagaaggtgaaagttttctaggaagaaccagatctttccgactcaggtccacctcccgtcccaccagtgtgcctcaccgacagaagtaaccgttccacttggcatggaatgtgtccctcagatacttccttgatagcggtgggtcccttgaccacttgataattcctagctcagaaactcagcggtcagggaggctctggcagcttctaagtttctgtttgagccttagcagttcagcaagggaccctcctctcccccctcctctttctgactttggctcagagattgtgacatgtcaccccagctggctgctggcatggtaacactaaaattaggctctccctaaggagcagagcacttaatgaaggagttcatccagttagaaagtctctcaagcaggccgggtgcatggggcaggcagctgcaaaggcgggagcccgggcgggggtggagggagtgcttggcccagacctccgccttccgagggcctccgtttccatgatgtcagagaggcggaactaactctgcctcaaatccagggaggcagcagcccctgtcccaaccgctctctggcttcgacacagcgcccaagcaaaggtgagagcactcttgtcttcctcaccaggtggatgcggagggcagcgctggatttcccgggggagcattccaggtttagtccctacctggccggagtctaattcctggccttaatcctgtctgtcatgttccctagctgactacctgtcttcaagcgacctcttgggattgacataggcggaaacagtgccttcaactcagagaaagcccctttgtggactgaccattcccactcttactgcgcttgaatccttgggaagtgagtttggcagaagatacgatctaaaagagaagtctcccccttttctttttgaagtcattggaaactgtgtggagacagtatagtatggtggtgagggcactggcttgagagcccgagcacatgtttctgtctcagctctgccaactctagagccctgggcagattttctaacctcttgtgtacctcggtttcttcatccttttagcaaaaacaaaaacaaaaaaacaggaaaaaagaaaaaggtaatctatcaaggattatcatcagggtgaagtgagcctgtgtgggaaatgagtctagtgtcaggaggcctggctgcaaatgcaccccgtgactttggatgagacccttcctctctcggggtgtcagtttccttataaacggggactgggccaagttgtcagtttctcagggccctttacaccctaacccatctgattctttgattgtcttccatcttctgccttccttacgtgagtaacatgttgctgtctctttatctctttcaaccagaaaaagatttacaaatataagaaagtgctgagtaacccaagccgctgggaagttgtcttgaaagagatccggaccctggtggacatggccctgacatcccccctgcaggatgactccatcaaccaggccccactggaaatcgtctcgaaactgctctcagaggtaaaacccctcccctggacccctttacattgtttgcctttccctccaccgatcaccggctccatgccaagcagcaggcgcaggcagagctccgtgtgggctgtgttgttgccctgctgccgaaggaggtgagcagttgcccacccagccgtgtgtgggagttgggagagggaggcttgccccagctgcttgcagctgtgctgtctggggattgtaggcaccgaagaggaggtgttgccccgtgcagtgagagccagtagtcccatccccatctctgtcttcccctagcagtggcccacatgagctccaggggtccagggggattcagctttctgccctcgtcaccccacaaagcctgtagatgtgctctgtttaatttaaacaccattttaaaaatcaggagatttcacagtacagtgggaatttccaggttctctttaaaaacaatcagaaaatccagccgcggtttgcagctggtgctacctgatgccacccgtcggctgggcctcctgtgccatctgctttgctggcctcctcgcatattgaatgtgtgctttgtgccaggcaccatctgggaattcaagcaaagacaagccccctacccccctggagcttgtgtcccggcaggggagacaggcagtgaacaatgaaactcatcagcgagtctgtcccgctgttggttaggcagaaggcgcttcggaaatgtgcttctttctgttttctgtttcaggtgctattctaggcgctttacaaatattaatactgctctcgtttatttgctcacctggccctctgggaacactggagttgatgactcctgatttaaactgtgcacagccaccagactgatgcttctgtccccctcccctgacagtgatacccccggtcctgagtctcccccgtcaagctcccatgcaagtgcctggctgcctggagccctcccctttctctgcaggcccacactggccgctgcccgtgggacggggcctggcaccggccctccgtgtctgtggagtagagaaggtccctcactccaggaggaggcgaggtgggaggtagaaagtaggtggcagtgacagtctcaggcagagggacagaggtcagaggtgttgtcctcagttgggagaccagcatcgttccaagaggagtaaaaacccaggctgggaaatgaatcacagagtggctggaattctgagcctgggtgctggatgtccagctccaggtgcagacttctcatctggagaaggggtccctgctcacctgtagtaagccaggcaggtgccaggtgccacccaatctggagtgcagtggcgtgacggctcactgcaacctccgcctcctgggttcaagccgttctcctgccacagcctcccaagtagctgagattacaggcgtgcgccaccatgcccagctaatttttgtatttttagtagagacaaggtttcaccgtgttggccaggctggtcttgaactcctgacttcaaatggtccatctgccttggcctcccaaagtgagacagcctctcttttaaaactcacattctctctgaaagatgggcctttctgtcttcacttcacagatgaggaaattgaggcccagtgatactgagtgacctgcccaactcacgtggcaagtttgtaatggagctagaagttccaccttagagttgccaagcgcttttgagaccaacttggccaccacttcagcgccaccaggctcaaccaccaccacacccttattaaatcagggcagtgctgagggcagcagacgtgccccattgccggcctcgggcaagattttttttcccctctcagatgtgcttcaggtgaccgcatgactgttggccttcacatccctccttgggctttattattattattattattattaacaatggggtctcactgtgttgcccaggttggtctcaaactcctgggctcaagtgatcctcccaccttggcctcccaaagtgctgggattataggcatgagccaccacacctaggaccagacacctggctgagggtgcttcttgggctttaaagtaaaaatctcaaaggcagctgacccttaagtgctaggatggaggaataaagatatttaaagtaggaaaatggaagaagtttccatgtgctttgaagctactgtgtcaggcaaggagtcagcattactcaccctactttactgaagagagctgacatttagggacagagctgggactccagcccaggctgcctgacccggcatccactcatgcatgctctgcagtggtcagtttgatggcccttagacctccccagtttctcccaaggaccctgcaaggtaagtattaaaatgtatagaggagtaaccaggggtgctgagaggttaagtagcttacacagggccagtcagattaagtgttgggccaggaccctcgcccgggtctgcccagtgatgaagcttatgcccctgcacatagatgtgagataaacccgggttggtagagactttctggcaagtatgtaactatggagatgaagagtgagaaaccgtgttgtagggtcggaaggaccttgtcctgccctcagtagctgggtggccttggacaagttgctaggcctttctgtgcccagttgttttctgtaaattgggtctgagacgagtacctatttcacagaattgaagatgcgatcctctcatatgcataaagtgcttggcactgtgcctaacttgcaagggcctttgatacatggccacattttcattgtcataggagatgtctgtggtctgaaccccgtaagcaccttcagccaggggtctggagctagtagctggaaaaacaaacatctgccttcgacctccgtgccctgttttggggctgggttgtttctctgttctgtttgcccaagttgtttgcaaggcctcctctggagaggttccaggcatcaccagaccaaccagaaggtggaaggatctggagggagcaggcagaggggcatcgtggagggagctgctaaggacgcaaaacagttccgagaaagaactgtccgtccaccagcaaagcaaagctggctgtccccaccctcccaggcctttgttgagttgcgtgtaaagtggccgcttagctcgagagtcaggtgttccctctaatgcagtggctattggtggacatgctctaccaggggtggaaaatggccctgggggagagaaggctccctgtagaatgcatgggctgtcctgtgactgggacaaaggaaatgatgtccgtggtcgccaaagccttcctggaaaggtgcgtgggtggcggcgagggatggatgtgtcgagctgcccttggcagcccaaaataaggaactgcttcttggatgggtggtggagcactgtagctcagtggcaggaaatatagactttagagtaaggacagacgggttcatatcctcactgcagcccctattaccctgcgcctgctagtcactgcatcccgtcagtcttaggcagctgatcagtcaatgggatagtagagaacctgtcataatcaaaagaaattggtggcatgagcaaaacaaagctcttacacagtgcctgaggcatagagagctcagcagtcataaggagagaccaaggccaggcttctccccgaagctgaaaaatgactgatagttaataatctaccataaacaggctgctcaaactccactcatatccactaaagaaaaaaagcgtgttcagatccaaaaaacatcctttcacatgcctgcattctaggtatcttgggtccaacctcacctaggtcaggacgtctcatggggaccggtagagactcatgttgttcattcagatgctgacctggcttcacggcctcccgcagccctcgggagccagcttattgggcaaaagcaaattcatagctcgcaagcttttcttttgccttggcttctgtaaacacattagatacccccatatgccttaagcctgtccaggtggtgggagccatggggctctgtctagaaccagaacaatcgatcttgccaacactgttcaaatgagaggtctctttacaagcagccaatgtggctcttttaggaaatacgaattggcaccactgtgtgtccaccaaaacagacaagcaaagcagaacacaccacgaaactagcaagaaagaagggcgggcacttctgagttttcctgtgattccttgtttatggcacagccgtctctttccttgttcaagtactcacagatggcggcacaggtcgagcatctctaatcgtgaaacctgaaatgctccaaagtccaaaactttcttttttagagacagtctcgctctgtcgcccaggctggagtgtggtggcacaatctcagctcactgcagcctccgccttttggattcaaatgcttctcctgcctcagcctcccgagtagcgagtaccatgcccagataatttttgtattttttgtagagacggggtttcaccatgttggccaggctgatcttgaacccctggcctcaagcaatccacactcctcagcctcccaaagtgctgggattacaggcatgggagccaccatgcctggccaaaagtccgaaactttctgagcatcaacatgacactcaaaggaaacgttcattggagagtttcaggttttgcattctcagactaggttgctcaactggttaagtataatgcagatattccaaaatttaaaaaaaaaaaatggaaatccaaaacacatgttcccaagcattttcagtaagggatgttcaacctgtaacagttaccaattatttaagaaaagtccagattgggaaggaaacaggacccctaaaatttcagcaaatgtaatccattcaacctaattatgtttttgcaagtcagttgctagaatttgaattcagctaaaacatctcgggcccactcacggaacttcatgttccttgggaacttagtttgagaagcactgaaatcatatacgtgttactcctaaaaggctgcctggcacagattaggactcttgaaaggtctgtttctttacatacttattatgaacctgccttctggcttctaagcagtttcactttgacgagggccagatcctctcccaatagcctattgaggttactggaagccctgttgaccgaagcaggaactgagtctcccctagactcgactcactcaaggtcacataactcaagccccgaaacagggacaagaactcagttctccctgccccaaaaccataccttctcccccttcccgaccttgcccctgagggtgttctgatctgtttaattaagaaaaaatgacagtgacagttggtctgtgacgctgaagatgtttcaaaactgtggatcttgaaatccaaatgctcgttttcttaattttcttttgttttgttttcctcctgctgtctccattcaatcctttagaacacaaacttgaccacccaggagcatgaaaacatcattgtggtaagttcctctcgaacacgctccctccacccacctccgcctcctggagcctacaacccttttcctggtttggggtaattctggcgcctgcgtaatccaccagcatctggccttgctccgttttgtcttttctagcaagccggacgcacctccctctgcctttgcatatttcagagccccagttgataggagcgggagtgtaattgtctgtctttgaggtttgtagcaaatgtatcataatcgcctcctccttcctgcgtctctgcctagggagttgaaggcaggagatggcagagcccgtataatttattcagaggcatcaccccattagctgaaaggtaaacgttctctttcttgccccaggacatgtctcccaattaatccacaaatagaacttggatttaattccctgtgatacataaagtgagatgctattttctgggactctaccatgatgtaagcatttttggggtaaaatatcttcctgaatgacttttagctacgaaacctaactctcacttgagagaagaaagaaatgaaattgcacctgctagatggtaagcaccatgctatgtatttgaattcacagataacctagtccctaaggagttcatcatctattgtaggaagacaaaagtgatcaccgcaaaaaatagagacattgagtgcagagagtaagtagagtgataaactcccctgggaaaggagccagaaagcttcctagaggtagtgctatctgagctgggttttgaaggatcaataggagttttccaggtggcaaaacgggataaaagcatcccagagagaagaaacaaaatgtgcaagagcacaaagatttaaagcaacgtagtgtgttctggaagcttcagcattgctggagcataaagcataaggaaatgagaagcaggcggatgggagatgaaatagaagcaagaggcagagccttttgtgcccaggaggggaccttggaactaacctgcctgggatgtctcctggctgcaaggtacagaacaagagcagcatcagtcactaggcccctcacgctcctctagccgaatcagggccttgggggacccactcagtcggccctggcaagcctagctgggtactgtatgcacaaaatgaggtgagccccaggcctttgattgtggagagtcaaggcagcagcttctgcctttgctgtcagctccagtgtctggcacgtagtgggctctcagtgggtgtttgctaacgctaacagtatagaggttttctccatgctttcacccggactgtccattgccttctcttgccagaacaggaggacaagtcaacctgggcacccccaatcactcaccaccacctttttctggcatagtattaattcatcaattcatttaacgaactttgctgagcatgtgagtctgactatgtgccagacacagatagagagctggacaagacttgaggcctgccattgaggactgaatgtgtgctgagagaacctggcagatcaacagataatacaaaaataacatggccaagggctgaggtttgttctgggtgttagagggggtgcagaggataggtacttaacctctgtcagggagggtcctgggaggatgatgatggaggacttccaggaggaggtgaccaaggtgaatcttaaaggatagataggagaatgtcaggtaaacggagcaagctggggaaggcagttcaggcagggggacttacatgtgcaaaggcaaagtggtaagacgggctgctgcagaaccaggagcaagcatgagagctggaaggaggtactgccttcctctccctgccagcaacacctgtgggtcccactgagtgcctggaagccctggatggaggacaagggcttgcattcaggacaagcctgggaaagaaattttgatctgagaaatccaggctgcatttatccagctaatgtggctgaactgaacccttaattgggtcaggttgagcttcccggctcagcaggaatgcctgagaacaggaaagaatttgatctgagggtctgaccctcacccctgcattttacagcctccccttccagcattcttttattactattgctgttgtcattattatgatgccttctggagcctcctttcattccaacagttacatcctcttatttgccctattggcaattagtcttctttggacatgcttggtagttttttatgcgctaatttttctaccatagcttgagttggttttattcattccattggccaggcagtagtaaccgttgttggtcatggaccaggagtccaaaccccagctgtggtccggctcactatggaaggcgctcaccatggtggtgaagaacatgagctgaatctaggttcaagttcagaatcgagttcagacccagaccccagccatactagctgtgacagaacttttaattttacttaaaatctcattttgcaagtatttcttttttcttttttcttttttttttttaaggcagagtctcactctgtcacccaggctagagtgcagtggcaggaactcggctcactgcaactccgcctcctaagttcaagtgattctcctgcctcagcctcccgagtagctgggattacaggggcgcacaccaccacacccagttaatttttgtatttttggtagagacggagtttccctatgttggccaggctggtctccaactcctgacctcaagtgatctacctgccttggcctcccaaagtgctgggattacaggcatgagccactgcgcccagccaattttgcaagtatttcatgagtatgagtatgttttcatcaggaaaagagtatttcatcccatcccagtgccctctttagaaacaccttgttttcaggtggtgacaaacccacacagacagatacggttgtggatttttgggggattttttcttttctttttttttctgcttttaatatgaatgatgtgatgcaggatgtgttgctctgcatttatttttttcacttcacaatatggcctggagattgttcgaagtctttccgtggctatctaccccacggttcctgatgcttgtttgttgtgtttcaggcaatcgctcctttgctggaaaacaaccacccaccaccagatctctgtgaattcttttgcaaggtacgggattgctgagctggggctgtggctgcaggaagtaacctccctctgtgcgcataccagggattgggtttgcacagaaaggccaaaaacctgggccccaccgtcttgggtcacggtcccagacacaggcggagagggcatgcccggcacccattcttagggctacacccacgtctctgccagacaggtgacaaagagtcacaaggggaacatcttgcttttccttggaatcacttcccggctgtcttaggagacaggttgctgcagatttcctgggctcatgacgtcagagctgggttattattagccaaggttcctctgcgcagtggctggcccacggtggggtgcggctgtggggctttccctgaacacgggaggcagcacggtgctccaggttagcttagaggagctgtggagcagggcatccgctgccgggcacccggcgccagccttgcagtgggattcacataggacatgtccagggcacatctttgtggctcaggccgaaccatcacacaaacctgttttgttctttgctgtgtggtttttttagtgtaataattttatgtccttggagagacatgttctcagcactcccctgtcatacccctgctgccccgctcagctggtcctcatccctccccgctcccattacctgcctcctgccacggtcacccgctgtcctttggagaggcgtgggctgtgtccagcagtgggaccagcctgtggggtggaacagcaggcccctgggaggaaagggggctgtggtgcgcttgatttcccttgccgccccttcccggccccccacccctcaccccagggagtcctctgtgtatgtgtcaggggacgggagctttgaaagggagacaagattcagttgtcctcctggagtctgcctccctatcaggattccttttctaccaatccacacaccttctggtctgagtgcccagggtacctgtcagggcctggaatgacccccacccccatccttaatgtgggcatgtgcaatgtgtgccccctggcccagggagtgaacacccgtgagtgtgtgtgtgtgtatacaggtgtggatacacacaggccccgggctcctcaggacacacaagggccttgtctgcctccgggactcatgggtatcatgcccccagaagagtggaattaaataacccagtatcctgagagaacggccagctgctcctctgcctgtcacaacagatcacctcctccatctcctgtccaatttaacccaaacctgccccatgcttgcctctcaagcttaggatttcacccagatctcatgattctcaaagtctggttctagaacactggatatttgttgtagaacaagatacacttgcctcactgtgtttcctacctgaggcttcacttgcctcactgtgtttcttacctcagcgttcctagtagcacagtttggaaagggatgaggtagaaaaaggtaccctttttggcattctttgctgtaatcctgtgtgggtgtttcaaagagggccgtctgccttttggagggaggggggtcccagccatgtgggatgcttctttggctattttgcctctgggagttggagcccagagaggagagcttgaggggaccaaagcctcccgcgctgcgtccgctctgccaaactcctgccaaattccaagatctgaggaaagtttattcatcttgctttctcaggggagccctgatttctcttatcccaggtctagcatcctcatctgggggccgggtgggtgatacatgtgtgcaggacacgagggaggggctgggccttgtcctcacagcctgtgaagggcttcctttccagtatgaaaaacaaaacaccgcgctggtgatgaattgggtctgcagactgccacccgagtgctaaagccaccagttgaagagtcacagaattttcaacaccctggtggtcaaatgccaaagccctcgtactatcatacccaatttccaaggtctttcagaccaaacatgcagaatcttagctttacagaagtctcattatatattaaataaggaccctgtcagaacgcctatgtgtaccatctgaaatagtctcaagctttaaggtcaaaaccaaacaaaaagcaaacaaaagctctcatctcgtctacttttttaactccaaaaaaaaaaaaaaaattttaaggctatggcactcgtaggtatttccccaaatgagttcaacacacctgtccacacaaacatctacatgccgacgttacagcagctgtattcatgactaccagaacgtggaagcacccaaaatgccttccagtgggtgaatggataaataaactgtgtaacaatgcagtgttattcagcactaaaaaaaaaaacgagctagcagaccacgaagagaaagggggagctttaaatgcatattagtaagtgagaggagcccatctgaaaaggctgcacactgcacgattccaactacaggacattctgaaaaaagcaaaactatggagaaagtaaaatgatcggtggttgccaggggttggggagagggagggacgaattggctgagcacagaggatttttagggcgtgaaacgacttcctatgatattacattggtggctccaggacattagacatttgtctaaacacccagagcgcacagcaccaagagtgaaccctaaagtcaactgtggactctgggtaacaatgatgtgtcagtgtggggttctccattgtaacaaatatcccacagggtatacgtgctacatttgttacaccgcacggtcctttggggaggcaagggctgtgtccaccaatgagaccagcttgtggggtagaaatgcaggcacctgggaggaaaggggaccgtggtgcactttaccccctgcccagggagtcctctgtgtgtgcatcaggggacaggaaagggaaacaagattgtgttgtcctcttgggccctgtctctccaccaggattccttttccagtgccccacatgcctgctggcctgcgtgcccagggtacatttcagggccgcctggaacgcccccaccccatccttaaaaggagcatgtgcagtgatcgttggggaggctgtgcgtgccgggggcagggggtatctgggaaaggtctctaccttcctctccgttctgctctgaacctagaactggcccccctccaaaataaactcatttttagaaagcagtgcagccgtgttcatcaagggaacccaggcacccacagctgggctgactgtccccagccctgctagcagccacgggctgtgttcagaacattcttagggccgcagtaactgtaccccactctgtccccagcactgcagagagcggccccggtccatggtggtcatcgaggtgttcacccccgtggtgcagcgaatcctcaagcataacatggtgagtcaccctgccccaacacccagaccccagcgcccagaacatgaggccccgcgcgcctccctggccttttgcgttggcacagatttggggaatgtggttggcccagcgtgacagccaggaactggggttgagattctggttaaggacttttgggggttttgtacagcttgtcctccattacggcaacaggaagaatctttttgcagttcctaagaattacaaaaataccgcagctggaggagaagaggaaagcctcccgggaagaataggcccaaataatgtctgtagatgccctgccctcaaggacccagagcgcgactttgcactcctttagtgtgtgctgcgcacagcgaggtccttccagagagcactgtatggaagggggcaggagtagccttgcagtggagaaaccagacacactcagcctcagccaggtgatcaaggtcaacatcgacaacaacaagccagttagacagaatattcccttcataggacgtataaaaacgacacttgacctctatggtcttcctcccagtaacccatcaccccattccaatcatgagaaaaacatcagacaaatcccaacaaggggacagtctacaaagtacctggccagtactccccacggtcaaggtcatcaaaaacaaggagattctaagaaactgtcacagctcagaggagtctacgggggcgtaacgactaaatgtcatttggggctctccatgggatcccagaacagaaaagggacatgaagggaaaactgaggaaatctgaataaagcttggcctttaatttttttttttaaatacaaaagcaggatttaattgcacacttagagcgggtggggcgcttgtaatctgtgtggccccttggtgttccctcatcattccagggacagcagcaaatgccattatttgccctgtatgtcacgaggaaactgaggcttagctaggtccactaagtggccacagggaccacaggtaggaataagaataacatctttttgcagatgcttattgaacactttcttggagtcaagagtgtggtgctctttgagtgtattgtgttattaaccctcatgccattcccatgacacctgtgcataggaggaatctgggacccagagaggtgggacgggataggcagggtctgatgagcagctgtgggtggtcctggtgggagctaaggagcaggcagcctgaggccagggcccattcccaatcacatgttgtactgagccagccaccacgttagattttagagtctcctggagcacgtgaaaacaactgaaaaagggtaaccacacatcatttcacttgtgatgtagcttgcctgtctccacaccatgcccctgaagaatagtatatcacctacagccccttccccagtcaggaatggaagtgcatgacacatgtgctcctctaccccttccatgctcatggcagacatcattaatcaattatagcactctttctgtagagccagagacagcatcacactctttcccctcctgcattccaggccaccactaccaactgaaatcgtgttagtaccataatgaatgctatgtaccattctctaccctaagcgattgcaaactgtaaatgaattgttgctgatttctgagcccctcctagatttggggtaaattcatttcttgttttcagaacacaggggatagggacaccctgtgcagttctttctccaggacaaggagactccccactgggggatggggcggggtttctgccttaatttgggcgctcatagtttcaaggaggagctctttctggctttggccagctagaaggaaaggtgccctgtttgttaactttaaaatcactacgggtgtagtgtatggagtgggctgtgccatgctggagttcagagcaaaggttcttcaggttttcttgcgaaggaccttaacttgtcaatggcagagccacacccccgggacatacttggcagaggaatgcctcttcaggcacataaacatttttgcatactccatgttagtcaataaaccgtttcataagggttctttgaggacatctgacttcaaagggaaaaaattcataattcagacaggctctcggggcttcaccatacaacgcctttcttgtatttggttagttttatgggcctggagtgttgaccatgtattaattttctctataaaaatcagaaccgctctgggcagacccagaatttatagtatctgtggcagtctggcagagagtagggaccctcagccatgagtcctcgcctcacttgtaacgagtaccccctaagtgatcccaggtgtctggggatgctttaacgcacccagatcccaccttgctcttggcgcctcctaattacacaccatgagcggcggcggcagaggagaactgctgggaggaccgaggaggatccgcctctcgtgtagaagaacagactgtattaaacagtgattatggccatgccaggcacaggaagacctgacctcatggaatcctaacaacacaggcggtgggcgagagagagctttgacatttactcactgaatgcgccctgatgcttaatgagtggcacgggtcagcagcaccgttgtggagctggggctctcagctggtgtggggggggggtcatgtctctggctaaggagcgtacctagcctgcctaagccatgagcctgttggggtggcatgaacagtgactgctcttcaccccaaatgcagtgtttctccttaaggaggcactcagacatttaggaaacggggggaacgtagccacggtgctgttctgggatttgggggctcccccattctgggtgcatctcttgcaaatatgttatgtgctccctttcacggatgagcaaactgaagctttgagagtctcaaagaatgttctttactagactgaaataaaaactagaaacaaaaggaagcggttctttagtatgttcctctggagattcagtccaaataattcgccaaactgcgttctgaagaatgaccatgtatctctgtgcccccacgccactcggagtgttcttgtggcaaaggaggcgagaagacacggctgtggtccccagtggaccgtcaagtaacctaacctccagttttccaaggggagcgtatttttcagaggctgctggatccctctgtaaatgtttatttccatggaaatgaccttgattattcaaaaatctaatagctaagatgacagttaccttaagtctctgttgaagcagtttacaaaatcataaaaccctcgtggtggaagggggctagagatcacttctgtggaccctcattccatagtggggtcagtgaggcccagagacagacgtggcagcccaaagccagattaaatacttgtgaggcagaggcctcattttctaacccaggagggagggagggagggagagaaagagagagagagagagagagagagagagagagagtgtgtgtgtgtgtgtgtgtgtgtgtgtgtgtgtgtgtgtgtttgtgctcatgccagtgcgtgcatttttctgaacttgctccgggggctctgcctccctctttatgtagcaggacagtcctagcaggcagacgagtgaaagctccccctgcactgtctctcacaaaggacccctttgactccacatgaagaagcccccagcggctctagaaactctctcctgggagcctgcgggagggagtggtaggaacgggttccactcagagctttcatgccagcttcggggtcagttagacctgaggggggtctctatttctgttctacagcttgaagtcctgatgcaggctgctctccttaaaaaatgggttccactgagatgggtacggagggacaggtctggagactccaggctcccctccgtggtcagccacatcacgtttatggagggtcgggggcaggacggtgccgctcctgggtggccagacacagcccgaggggctggcagtcccagcacctccgcagccctggccacgaccctgggaatgaatgcggcggccagattcacaggcccctgtccggcccgtgcctctctcctgcacctctgttctgctcctggcaagccccaagccccccactgggctgggcgccgacttcctgcctcctggcagagctctctgtgccgtggcccctgtcttcctgacacctggaagaggccgagcacggcagccaccacatatggccctcagccggcacaggcagtgtccctgtgtccttgacctggccccttgacagagccccgcagtggacactttagttccgggggcctggtgcaggcgctgctttccctagcgtggcacagatggggcctccaaccagggtggtgtccctgtcccctcatcatagtgacacgtgccagtgcctcccctgccactaatgcctggtgcccaactcctcattgcacatgtatgcctctgtccacagcagcctgtcacaaacacacatccattcacacccacctcacactcactgccttccacacccacctcacactcactgccttccacacccacctcacactcattgccttccgtacccacctcacaccttccacacccacctcacactcacggccttccacacccacctcacaccttccacacccacctcacactccttccacacccacctcacactctcctccttccacacccacctcacactcctccttccacacccaccacactctcctccttccacacccacctctcacactcacctccttccacatccacctcacacctccacacccacctctcacactcacctccttccacacccacttcatacctccttccacacccctctcacctccttccacacccacctctcaccttccacacccatctctcacactcaccttccacatccacctcacacctccacacccacctctcacactcacctccttccacatccacctcacacctccacacccacctctcacactcacctccttccacacccacttcatacctccttccacacccctctcacctccttccacacccacctcaccttccacacccacctctcacactcacctccttccacacccacttcatacctccttccacacccctctcacctccttccacatccacctctcaccttccacacccacctctctcacctccttccacatccacctcacacctccacacccacctctcacactcacctccttccacacccacttcatacttccttccacacccacctctcacctccttccacacccacctctcacctccttccgcaccaacctctcacctccttccacacccacctcacaccttccacacccacctcacactcacctccttccacacccacctcacattcacctcctcccatacccacctcacactcacctccttccacacccacctctcttctccttccacacccacctctcacacacctccttccacactccacattcccctcggaagcaccctctcttgtccccccagcctttctggctctcttttctctttctcgtctcatttgtctcacaagtgccttttgagggtggctttctctacagccagaagcacctgctcatcagatggtccttcagagtggaagcgcgggtgtcgcagtgctattctttgaagtagacgccacctgtgctttccagagggttggtgtctccccattgccttccacatcaacagctccaggcagagctcggtcccgcccttctttctggtgtcctggctgccctgggctcctgccctgcctagcaccgtcccgactcctgtcctctgctgtctccacaggactttgggaagtgcccgcgactgaggctgtttactcaggagtacatccttgccttgaacgagctcaacgcggggatggaagtggtgaagaagttcattcagaggtgggtctccggcgcgacgtccctctgtggcctaggagccactttcctctcggatcctgtttactcagatatccacggggggctgtcgtgtaattaaatgaagactccctctatgaggaagcccctagcctactgcacggtgcccgataggaactcggacacactggacctcagcaacactgctgtttcctcaggtcccacgacccctcaggctgtaggtgccacatgtttaggactctgtcccacccctggtggtcccagagcgtcatcgtcgggtgcttgaacaatcaccccataaacataaccaagaggaagccaaatgttcttgctcttactcacttttggttcttggggttggtgttttgggttttttttggggggggggggggtggttgcttttgctttgtttaattttaaattttctctcggtgctccagtttcctcatctgtcacacaagaaccatagtatccctcgcccagttagtgtgatgctccagtgagtaggagacacaacacatggagaatgctgcggaagtctcgtgtcaggccgaggtgtcatcattcttgttcttctcatctcttttgtttgtttgtttgttttgagatggagtctcgctctgtcacccaggctggagtgcagtggctcagtctcggcttactgcaacctccggctcccgggttcaagcaattctcctgcctcagcctcccaagtagctgggattacaggcacacgttacgactcctggctaatttttgtatttttagtagagatggggtttcaacatgttggccaggctagtcttgaactcctgacctcaggtgatccacctgcttcggcctcccaaagtgctgggattataggcgtgaactgctgcccccagactcttctcatgttttaagaaaatcacagtaacccatttaaacaagttctgaagctacgtatttcctaaatatgcccacttggaactcacgaagtcgtttgaggttggctttgtgacatgccctcatgccagaaccgtggtgacaccacccagttgtggtttgcaaaatcttgtcaggttagggcattcttagtgacagcagcctcgatgacagcttcccagaaatggtacaggtgttatcctcaggaccaccaaaatagccaagacaagtaataattagtggcacttattgaggacttagtaactatgttggtgactctatgctaagccaaaatgaccctcatcatttttcttccaaagcaggatatgtttgaaagtaaaatgaggtgttaggaataattaattattcctgaaccaccaggtgtgagcatgactgtcccaggacgtatggccaccatttgctaggtctctctgtgaattagaaaatttggtcctaactgtaccccaactgaggagggggctgctatcctcattttatcgctgcagaaacagggtggagagtttaggaggtttccaaggccactcaggggtttgaacccgggaaccctggatccggagtccacagccaggagctttgccttctgctgcctgcacgtggcacagccggggcccaaatcctggtgccaccaattgcacagtgaaggctctcagagccccccaagtggcgctggcagagcgggcagccccgtgcctgagcaacgccctccctttccccccttaccctgtccatgggccccactcctgcaggcttctcaccccagccctctgcttttttccagcatgcacggccccacagggcactgcccccacccccgggtcctgcccaacctggtggccgtgtgcctggctgccatctactcctgctatgaagagttcatcaacaggtcagttgctgaaccaccgccacccagagggcttgggaggggcaaactgccacccccatcatgggcaaagtcaccaagaactgaccaggccagagaggtggagtggctgtttactgggcagacctcatggtgtgtttgccagttcccctgggcacattgattcatgggcccagaagccagggatgctgctgaaaaagcaagcactgaatcagcaccgcaactgcaaggctgttagagctgcttggctttagggacagatgttttatgctgaagatttctcaccactggagaggtatgacacactggtgtgtgtgtgtgaatgtgtgcacatgggtatgcaaatgcatgtgtgcactgtacacatacatgtgactgtgtgtacgtgtgtgcacatggaggtgtgaatatgtgcccgtgtgttggggacaagggttgacagtaaggtttatcctgtctagtcttggctttgagaacacaggcttttgcccatgatttgcatggttttattttatttttttgagacagggtctcaccctgtcacttaggttgtgcggcaatacagtggtgcagtcatagctcactgcagcctcaaactcctgggctcaagccgtcctcccacctcagcctcccgagtagctaggaccacaggcacatgccaccactcatggctaatatttaaaatttttttgtaaagacaggatcttgctgtgttacccaggctagtctcaaactcctgggcttaagcagtcttcccatttggacctcccagaatgctgaggttacaggcatgagccattgcatctgtttttcttgagcgcctgctgtgtgcttgacacaatttcagtgctggagagcgagcaagatcacaaattccctgctctcttggggcttccattctaccaggaagagatcatgtacaagtaaatgtgcaagatcatgtcagagggtaagaaaaaccgtgagagcaataaaaccgagtggtggggtagcaagtgaccggaagaggtggcagggcagggccacgacctggctttggagcctccaaaaggaaactccaagaccaggatttgggtggaagtggcttcctaggaaggtggtcccaggaaacactgggggacagggaagggaggacatcagtgaagtatgaattaataagcaggtgaggctgggcgcagtagctcacacctgtaatcccagcagtttggaaggccaaggcgggcagatcacttgaggttaggagttggagaccagcctggccaacatagtgaaaccccgtctctactaaaaaaatataaaaattagccgggcatggtggtacatgactgtactcagctactcaggaggctgaggcgggagaatagcttgaacctgggaggcagaggttgcagtgagccaagatcacaccactgcactccagcctgtgcaacagagtgagactccttctcaaaaataaataaataaataaataagaaagcaagcaagcaggtgaccacttcaggcagctggcatgcactcccactgtgccccaggaggccgtgcgtaacacactgagagttgctctgctgagagttgctccgccgaggctggcggtgctgggatagtcactcaccagctcccatccctcgctggctgagaactgctcccgggatgcagactaatgcagatgccattagtttatggggaactttctgcagtgacctctggtgtcattggagaggatgtgacatgcagaacacagtggtctctgctgcagccacccagttgttcaggtggtacactacacaactccaaggagaccaacatgagtccagaccccaccagagctggggatacagcaggagggtatttcagtcttttctcaaaatgaaggcagtagagcattctgagtcgctgaaaacctgtacaggggggatttctcaaacaaatgccgtactgctgagttcttcggaggggcaggaaaaggcatttgataaatcaggggctgttttcttgcagcagggcatgagagagggtgactcttttaatgccctcagcctcaggtcccgatgttcaaaggggatcatgtcccaccttgaatcacttccctgatcagaaggaagtgcagggactccaggggccagaatgtggagatgggaggctgctcattcccaagggcatgttctggagctgacagcacggtgaggcaaaaagaggagaaaacggaagccagagggtagtatcaggcctgcccttttgtatttttagtagaaatggggtttcaccatgttagccaggatggtcttgatctcctgacctcgtgatccacccaccttggcctcccaaagtgctgggattacaggcgtgagccaccgcgcctggcttacagtatttaagttatacccagagtgtgcaggagccagctcacacgttacatttgggaacacatcccttcccagttctgtaatgatatcatattgatagcttgaagtagctgtggtgagtatttacaccaaagaaattggtaaacactgcagatcagggcttcttttttttttgagacagcttagctgttgtcgcccaggctggagtgcagtggcacaatcttggctcactacagcctccacctcctgggttcaagcgattctcctgcctcagcttcctgagtagctgagattataggtgtgggccaccacacctggctaatctttgtatttttagtagagatggggttttactttgttggccaggctggtctcgaactcctgacctcaggtgatctgcccgcctcggcttcccaaagtactgggattacaggcgtgagccaccacatccagccagatcagggcttctttctttggagagttggttgttagacatttaccagcgtactttgggttatatgtcaatttaaaaaaagaaagaaagaaagaaagaaagaaaagggtgcccaggaccctcccagtgccattctgatttaattaggatggccctggcatctgtttttggaaggagcgttggggaggtgatatttacgttaatacctcctggctgttctccaggcaagaagcaggaagagggtgacccagggagagaaccacatggaaaggcctggcagtgatgggtgaaggtgccattcgtcacagtgtttttgtttttggtttttgggtttttttggaaacagtctcactctgtcacccaagctggagtgcggtggcgcaatctctgctcactgcaacctctgcctcctgtcttcaagcaattctcatgcctcagccacccaagtagctgggattacaggtgtgcactgccacacctggctaattttttttttttttttttttgtatttttagtagagatggggtttcgccatgttggccaggctggtctcaaactcctggcctcaagtgaaatgccccccttagcctccagaagtgctgggattacaggggtgagccaccatgcccgtgtacaatgtttttgtatctacgggtccttgaaccactacttcagaatcacctggactgctttaaaatagattcctggctgcaacatttctggggtatggcccaggagtctgcattctaaacaaactccacaagtcattctgctgcacactgaatatggaggtccctgcaggggaagagctgaaggaaatccagtgtgactagagcagagagaggaaagggaagcaaaagatggagttggagaggagagagtgctgggccatgaatagccagcttctcaaacctcctggtgcctgggactctctagggttggagttaaaatgcagatttggattcagcaggtctggggcggggcctgagactctgcttgtctaacaagctcccaggcgaagctgcaggctggggatcactctgtaagtagcagggttgtcctgggtttcagtggcagaacttttatcctgggaacattggagagtccacagtgggttgtaagtggagaagggacgtgatgggatttcagttccattcccctctggctgctgctgtgaggaggatggagtagggggcaggcgtgaccctggggaacggttaggtggctgtggcaaggagatgccaggttggaggcgtggcgagggtgagatggtgcctgctgcctcgtgccagccctggctcagctgtgttgagccccctcggagcccacagtagcctgggttccagctgatgccatacatttcctggatatcacccagagaagcacgatgctgccaacacgtttcgtgggctcaggtccatgacgcccccctcagccagtcccttcaagataaagtccgtcatgtcctccaggccgtccccagtgctctcggtgggcaaatgtacacaatgtactcacactgaaaagaacagacaacttgacccaggttagcgtggctctcttgaaaatcaccaatctgagccaaacagccttgaaaatccacttttaaaacccagcaacggcaaacaaagagaaatgcagtgttgagtacttggggagcaaatcagatctggaccagagaatttaggtctccccccatcacagaccacacacaagttgttatcaacgatagaattctcggactttagccgatggattgtttatttcccccagcaaagctgaaagtgtatttattaaacacccttggtgggctcagctcaggcctggttcctggcatgtgctggatacattcagacccttgctgtgcatggggttcaagttctgcacacagcccttggaggggctattcacgtgccccctcccaccccttcccccagctgcaacaattccccaaacacaatgccagctgtgtggccctgtcctcaagcctgggagcccctttagaggcacaggacccatgcatgtgacacatgtggggaaggactagacaagcagctgttttcaatcgtgccgttgtgctcgaagtcttggattagtggatctcaaccttgaccacacacgaggagccttaaaaattactcatgtccaggtcgcatcctggagattcctgtctaactgggctttgggatgtttggaagtgtacccaggggatcctggtgtcccgccaggggtggagagctttggtttaggaggagttcgagggtaggaagggcaagagtagcaggaagaaatcaaggaagacttcctggaggaggggacctgcacagctcttaggggaccttggaagccaacctagttaggaggatcctgggctttggggtccaggagatctggcttcaaatcccatctccgtcgactcatgggctgtttaattaggggtagatcatttaacttctgagaccgtctttcctcacctgtggcacagagacggtcggaatcactgttcagtgatgtgtttgagcatctgtgtgactgcacttagcaccttgccggcccatgggcaccagcagaggaacccgttgatggtactactgtcccttataatgcacctcccaggcaactgggcacgttgggaagcagtcagaggaggggctttaaccaggtcaaggctctgacaagtcctgccattaagaggcctaatttcatcttgtttgcccagtgtttgcctaacaaatgtgagattaataatgccatagagcccctttctgggttaacatgtgttaacaccttgtgcaggcttctgttcctctgggcagttaaagatgctgtgcctggagggttacccaggaggagtgggggttccgcagacagaagggcagatactgagcttgctcacttggctgggtttgggggcaggagagcagagtcctggaggacattgtggcatgaggtcagggattggagggcagttagactgcaggaagctactaaaagcaaaacagtagatcccattggcttatcaagaaagtggccagtggcattttggtggaggagaatgccaagagccttatggctgtcacgtgaagatcagcatccactcagtcggtcagcaaatattttttgagcacctgttatgtgctggggtgatagcatgggctgtagagacaggcaacctgggttgggctgccatccccacctcttcctgtctagaccttgggcaagccgtgcacccaggctgagcctcagtttcctcatttgtagcacaggaatgatgatagtattacattttggcctcatcctgggattcagggaggcctttagtctgatgggtcatggtgcatcatgaacggtgcctgtactcatgtgccctctcccgcctcttcccccagccgcgacaattccccaagcctgaaggaaatccggaacggctgccagcagccgtgcgaccggaagcccactttacctctgcgccttctgcaccccagcccggacctggtgtctcaggaagccacgctgtctgaggcccggctcaagtcggtggtcgtggcctccagtgagatccacgtggaggtggaacgcaccagcactgccaagccggcgctgacggccagcgcaggcaacgacagcgagcccaacctcatcgactgcctcatggtcagccccgcctgcagcaccatgagcatcgagctgggcccccaggccgaccgcacgctcggctgctacgtggaaatcctcaagctgctgtgagtgccccccccgcgtgcccgcccccggggccggtgggaggagactgggctttgctgctgggtgcggctgtgtttgttggttcgagctacgcagggccgggcatggtagagtggcttgtgtgtgagtgcacacgagctggtgtgtgcaagagtgtgcataagcacaagtgtggctgtgagtacaggcatacagggtgcatatgtacaagtgggtgaggcacatgtggctctggttgtgtatctgtgagcatatggtgtgtgtatatacacacgtggggtgcatgcatggctttgtacctgtatgcttgagtgcctgggcacatgtgcaaggtgcatgcccaagcatacatgtgtacatatgtctacatgagtttgtgtgtgtgtgtgaggatctggatacatctgccagggtgtgcaggagcacaggggtgcccaagtgtgtctttgagtgtgtggacatctctactgtgttgggtgtgtgggatccttagagcttgtgagtgtctttgtgtgcctgaacggccatgggtggatgtgggtgcgacagcacacgtggtctgccgagtgtgtgtgtttataggagagatgggtgtgggcatgcctgtggatttctctgtagggatgtgtgtgtgtgtgtgtgtgtgtgttaaatgcacagcagtgggtgtgtctaggcacttgggctagttttgtgcactagtggctgtggctgcatgcatgtgggtgtaaccatttgtgctgtagggttagagagcatgtgtgtttctctgtatgtttgcaggtatgtgcatgagcccatgtatgtgtgtgttgtgtgagccatgcatgccgtgtgtctttggggtgtgagtatctgtgcatatgcatgtgtctgagtgagtgacgggtcatgtgcaggagtgtgtgagtctgtcttgggtatgtggctgtgcgtatttgtgccgtgtgcctgggtgtctatgtgtgcacattggtgttgtgtgtgcctgggtgtgggtgtaggagacccgtggacccggggctgctctgggtggtgtggcttctgagctggctccttctgtgcctgtccctccccgtccctgaacctcaactctgtgactctagggtggaggggagtacagttcttaatccttgacccctaagggtctctccagccttgccatccacacgctccacctgacacatctcaaacccgtgagcacctggttctgggagccccagtttgagggatctcattgactgttcccttctgccccccacagagccatgtggttccacagaccagctcaggtctgcagacactcagcagacacctccccctttctcgctccacaaactccttccttcggaacaagctctgccccactctcaggagttttgaatccagagacaggcattttcagatgcagctgcatgtggttgctggacctttcggaggggttcggggtatggctgtgttgtcatatttaaccaatgcatggtgcctgtctagagccagggctcccggggccctcagcctgcagggaggccactcggaagcccggtgcctggggtgttgtctgtgtgggtgggtggggtttccctgagcccctgtgtcgtcacgcgctgggcagcgtttggtcattctgtcatgtatgtgttgtgttgctcctggagcctgctcagggtttcgagggacagagggcagcttctgagggcctggtgagctggagaaatggctgggaggcaccctggggtgccccctgtgctctgctagcaaggcctgtggtgtctgtgaaggtgaacatgcgcacacacgttcacaaggtggctgctgctggtttgaaggagatcgtggaggcagcgtccccacatagcctcctctgccctggctttggccccggagaggaaagggtggggtgtgcccaggggttcaggaccagccccgcctcgtggtcccagcagcagaggtcaggtgagggcataaccacattcagtgaccgccacccccagccaagcggaattccagatcccactaagagagccactccaagaatacgtcacagccctgagtgtcttcaaggcagagaagggtgccagctctcccagcggcagccgggttagggcgcctccctggattttggagggggctccctgctctgatggaggtagaagcctccaggccagagagtggccccgctgtccactccaactccccagttccagctggtttttgcaaacaccgtgagctcctgggccttctggtatttggggcctgactcctatttctcattaagcactaagggtttgagtttcagcacgcagttgacacacattttttccttcttcataaacatgctcatgaatgggggctctgttctcccccatctgcgtccagaccccctgcctgcccgcatcacccagctgccagggtgcaggtgggggtcagggccatcgccaagggcccaggacagtcagggcaagccaggacgggttcccgatggggctacgcagaggagcaggtcacgcctatccccaagccctccacaaaatgggattatgctcctggcagcctcttccatcttcggggagctcaacacaatttgggcctgataactgtattttcccaacaactttcctccccacacccagcaggctgcttaagttgctggctcattggaggcttcaaactggttggacccaaacaaccccagccgctcaaagggctccaaagtgagatacgtcaggaaaggcacagactcagagtcagaccatgctaggttcaagtctcacccgtgccacatactagttgtgaccttggacggttggtcatcctctctgagcctccggtcccaggctgggaggtggcgcaagtatggctgcatctggcattggcaaagagatgggaggggccagccctgagtgcctggcgcagagcagacacctctgcgaggtgaacacctggccaatgggagtagccgccgtttatgatgcagccatgttcccgccgcttgaccatactattgagggcgagatgcgtcattgattcagtaagagtgctttgagagagaaaagccacatggcatttattgcacacctggattgcaggaaacttgcctcctagcattgaggaaatgcagccgtgggcctgagctgctgtggaactgtggccagtgttcttggctcctctgggcctcagttttcttgtctgtaaaatgcatgtcttctcggaggactgcatgagaattcagggatgttggagatttttggtgctggcctagcctctggttcttgataagagtaaactgctgttgtcagcctggtgcggtggctcacgcctgtaatcccagcactttaggaggccgaggcgggggaattacttgaggcctcaagaccagcctggccaacgtgacgaaatcctgtttctactaaaaatacaaatattagccgggtgtggtggcgggcgcctgtagtcccagctactcgggaggctgaagcacgagaatcatttgaaccccggggggcggaggttgcagtgatccacgattgcactgctgcactccaagctgggtgacagagcaagactccatctcaataataaaagcgtgaactgcagttatcagtattgaagtgctgcccaaatgggagttacacataaagaaaaaaagaagcagccaggctcggtggctcacacctgtaatcccagcactttgggaggccaaggcatgcggatcacctgaggtcgggagttcgagaccagccttaccaacatggagaaacctcgtctctactaaaaatacaaaaattagcctggcgtggtggcacatgcccataatcccagctacttgggaggctgaggcaggagaatcacttgaacccgggaggcggaggttgcagtgagctgagatcacgccattgcgttccatcctgggcaacaagagcgagactcccatctccaaaaaaaaaaaaaagatgactttatgtggaattgaagggtcttaaagaggacgttgccaggcggggctcaggaaggcacgcttagagcgaaccacatccatcggagagggcagtgcaggtcgcagggtgcacaggtcagtgtttcccgctccactgccagggagcaggggtagtggggcgcaggccctgatcagttgctgcgtgttcccataggaaggcccctgcatcattagaatttgacacttttgaaaagtaacctaagttgcaaaaatttcctggaggtccttgaaaaggaaaactattccaaatgcgggtcgaggttgatggtgaaaaaaatcaccgcatgaggcgcaggaggggtgaggtgatgaaaagaacgtggattcgggaggcgaagaagagctttgggatttgtagtcatttggagtccagctcttttcctgctgggcacctatgtatgattcacaccttcatttatccacctgttgattcattctttcatccagcttttgttgtatacctacgccaggccagactctatgccaaatgccatactggtccctgtactcagtccctctgaacctgagtattgccaagtgctaagagcagtgacatcaagcgctcagtgcggctgctgtaaagctcagatggggagagtgtggaagccgtggcccactggggccacaggggtaggacgcgcttctgattggctcccgtcgaccgcttgggactctttgcaaacattagattttaagaggccttggtgggctgcagctcagctggaagaggcccctccctcggggaacttcagggaaatgcagatgaatttggggttgtcctaatgactgggaggcagggccaggggacatcctgtattacctgcagtagttccgctcactgcaacctctgccccccaggttcaagccattctcctgcctcagcctccccagtagctaggattacaggcgcctgccaccaagtctggctaatttttgtatttttagtagagacgggtttttgccatgttggccaggctggtctcgaactcctgacctcaagtgatctgcccacctcagcctcccaaagattacaggcatgagccactgtgcccagcctgttttgtaatttttaaaaagtctttgattcttctaggtagttctttcttatatgtgtttattttttctttttctttttttttttttttttttttttgcgatggagtcacgctctctcacccaggctgcagtgcagtgacgcgatctcagctcactgcaacctctgcctcgcgggttcaagccattctcctgcctcagcctccccagtagctgggatacaggcatctaccgcctagcccggctaatttttgtatttttagtagagatggggtttcgccatgttgaccaggctggtctcgaactcttgacctcaagtgatctgcccacctcagcctcccaaagtgctaggattacaggcgtgagccaccacgcccagcctgtttggaaactttaaactgctcattcctggagcacatgataactctagaaactcaaaggtccctggagcatttaaggccagcagatgtgctgtggggcctgggaaggtccctgatgggatgaccgcacaggtggagagaaagggaattttcctgaggtcctccggcctcgcgggtaacagccactgtttctcagcctgggttcaaatccccgagctagctggtttgcctttcaagggagcagatgtttctggatgttgcatagcaggagcaaagtggtctgaatgtgcccccacaggggccttctcatgccccgtgccttcccaagcatcaggccaccgtgaggccgccacgttctgcccgtgacttgcaggagattctgtgagtcagggaaagcagcgaggctggcaggaagcgtcctgtccacagggcagcacagggctctggttgaggtggcatcttctgaactgggttaaaatcccagctgagctgcgtgaggtgggagacccgggctttgcactcacaaagccttgttcagtcccaacatgtcccccattagctctgtgacctttgacaagtgtctgaacctctctggacctccgtttctcatctgtgaaatgggggttctaaggccctcttcatgggagggttaaatgtgcaggtgcctaatgcctgaggcatgttggggtcagcaggatgcatcaggcacctgcctgcttgtccgtcccctccgtccaagctgggaagggcccagccttcttttctccttcctaggtgggcagtcaggtcgctcacaccctgcctggtgcctgtcctcccaccccaggccagccttggccaaatgggagactgccccagtggccagaggcatcccatcctaggataacaggcccgcccagagccagggcagtcccgaggcggggactctgctggccactgggtcctgtgccgaggcccgtcacagagaggcccatgcacaagagggttcctcattcccttcttcgtgggcctgccagtctggggacacccagcctcacctcccccacaacctctgtccagcgccccccattcatccaccaacctggtccgactggggtcacagacttccaagctggtctgggccgaggcaaggaagtccacttgccctctccctccttcccatgcacccctctcggtcttgtgggagctgccaggaagcggagccccaggctgggagaccgagaggaggaggcttctgtccagaccccgcctcagacaggccacagtctcccactggactgagcacctgggagtacaggccacgctcacggttcacagaacaggctcaggagtaacaagtgaccatgggcctgctgctggggctcatagtcccccgtggggaccctgattcctctgattgtgggtgatttcaaatctccttagagttctgcatttcatgacatttctgcatggaatatgctttatttttaaagtaaaaaaaaacctaagtgctcccctccctttcattttttgagatactctgtcaccgaggctggagtatagtgccgcagttacaggtcactgcagcctcgaactgccaggctcaaagaatcctcccacctcagactcccaagtagctgggactacaggtgcacaccacctgcctggcttactttttttttttttttttaactttttttttctttttagagatgggatctctttatgttgcccaagccagtctcgaactcctggcctcaagcaatcctcccgcctcagcctcccaaagtgctgggattacaggcgtgagccaccatgtgcccaccagtgtccttgtgatatagggagatcgtcttccttctcaggtgtgagccgggccaccctccttgtgagacatggttattgagagggtggagcacagacactggggccaggctcacaggttcagatcccagctctcaccagctgtgtggcctggggccagggcagcccatcactgtgtctccattttcctgcctataaaatgggggtgccaagagcacccgcccagccaagttgctgggagagttgcatgggctgacgcatgggagcccttggagagcacctggcacgcagcaggcgctgcagacgaggtttgctgtcaactgcatttccattttctggaaaccatgagtcagggacaggtgggaggaaaggaggaaggtgattcttctggagggaagacaagctagctgcaaaaacagatgacccctcagaagggagcatgtgaatacgggggcataaaggggtctccatgtcctgacatgcacacgacaggcctcaggctcctgcagctctgagaaccccaggctgcacctgggccttccgcactcaagcactgcagtccagaggacctgctgtcagtcctcatctgcctcccaggcgtggagttcagcttcctcaccggcaccctctgccctcacataccgctctggagattaagtgagcaagtcgggtaggcagtgagtaagcggtcgctggcatcactgtcaggacttatctcaggcaacaggctttcctggtcattcttttctccgcgtctggcatcggagcctttcctcagaagcttccagggtatgattggggttctgaaggctgccactctatcgtgggcttatttggaggaaggtggggcaggaaaagccctcactcaggggttatctaaaccgcctgttgtcgatgggagtgaacatttgtacttggtgaaaaaaacatctcctcccgtttctatgtaaggcacagttagacacacagcacgcaaaccgatacacagtgtatctgtggtgagtcgtatgtgggtaggggtcccgggaccacccctctgcccagcccgggtctgagcaccccctggcctctcccgtgggtggtgcccaggtgtcagcggggcatctctctgcagcgcctccccaacacagaccactggacaagggttcagatcccacctcctgccccagtgcaagccaggatcgaagtcagcatcccactcgatcttggcacctggtggcacttgctagtcccccagatggagactcaacatcccttctgctctgaagccggtcacaggccccaggctctgtcattggcccggtcccagtgtgcactgggccttgtgttcagcagtcccctcccaagcaccagccatccacccagcccggggcccagcatgggggatgcagagatgagacctgggcccctcctggggtggtccgaggcaagatggtcagaagctggggaacaccagggacagctctgtgattcggatggggactgctccagtggccacccctcactttatgtgtcacggttttaagctctgggccctcagaggtgcccaggcctggcttaggcgagaactgactacctctgggtttgtttttccgcggagtccctatagccagagagatccggaacccaggtgggggaactggttataaacacagtgcaggtgctggggccgagaggacgggtcatggtctttgaagcacctgaggtcagatctcagccacttgctggtgacttgtgggaaatcacaaacagctctgagcctcattttcctcgtctgtaaaatgggggttgtcatgactgcagtctctgggggccgtgtgtgagtgctctgctgtgtgatacaagcccatctgtactcagactgagacgccggcgagttctctggacgctcccagcttttgggggcaagagttggccaaaaaactccctctttatgaagctgtgctggtaggtggtcgggaagcagcctgttgggcctcaggaaactcccgaagctattgcttccctgctgtggcctggctgtatcacagccctgtggtcacggtcagtgaattgccatactgctccttgtccgtaatttggactcagcacacagggtcctctgggtagatcccatgagcgaacacaagcagtgcccttacttcaagccccggtgcgcaggcagcgcagagcgaattgcatctgcgttatcagcagtgctaatactgttcggttgtgggacagtggtcttcccagggtcggatgggggtgacaccctggtgcctggcttcaccacacaccatggtgtgatagagcctgaaatacctggttctgagtccagctttaccccttcctaggctgtgtagatgactcggagtgggtaactgacctctcccgctgtctctgcacacaggaaggaggctctttcatgaaagggttaagtgaagtcaggtgaacagcacggtgcttcccgcagctgctctcactgaggtttagccctccttccttacccaggcaggcgttggcttttgctaagatcacagccgtggcctttcagggctggtgagagccaaggctctgctgtcacagaagcctggatttgactcctcatatgccacagctgtgtgaccttaaacctctgagcctccagttcgtcatctgttaagtggggttagtcacactgactttattgtgctcttgtaaagagtaaatgaactaaggtatagcccttagcatcctgcagtgtgtgtggaaagtctccgtgacatcggagctgctgttgttattgtcattgttattaccgtcattagcatcaactctgtttttttttaatatactttaagttctagggtacatgtgcacaatgtgcaggtttgttacatatgtatacatgtaccatgttgatgtgctgcacccattaactcatcatttacattagatatatctcctaatgctatccctccctcctcccccaaccccacaacaggccccggtgtgtgatgttccccaccccgtggccaagtgttctcatttttcagttcccacctatgagtgagaacatgcggtgttcgttttctgtccttgcgatagtttgctcagaatgatggtttccagcttcatccatgtccctacagaggacatgaactcatccttttttatggctgcatagtattccatggtgtatatgtgccacatcttcttaatccagtctgtcattgatggacattttggttggttccaagtctttgctattgtgaatagtgctgcaatcaatatacatgtgcatgtgtctttatagcagcgtgatttataatcctttgggtatatacccagtaatgggatggctgggtcaaatggtatttctagttctagatcctcaaggcatctccacactgtcttccacaatggttgaactagtttacagtcccaccaacagtgtaaaagtgttcctatttctccacatcctctccagcacctgttgtttcctgactttttaatgatcgccattctaactggtgtgagatggtatctcattgtggttttcatttgcatttctctgatggccagtgatgatgagcattttttcatgtgtctgttggctgcataaatgtcttcttttgagaagtgtctgttcatatccttcgcccactttttgatggggttgattttttcttgtaaatttgtttaagttctttgtagattctggatattagccctttgtcagatgggtagattgtaaaaattttctcccattctgtaggtttccttttcactctgatggtggtttcttttgctgtgcagaagctctttagtttaattagatcccatttgtcaattttggcttttgttgccattgcttttggtattttagtcatgaagtccttgcccatgtttatgtcctgaaaggtattgcctaggttttcttctagggctattatggttttaggtctaacatttaagtctttaatccatcttgaattaatttttgcataaggtgtaaggaagggatccagtttcagctttctacatatggctagccagttttcccagcaccatttatcaaatagggaatcctttccccatttcttgtttttatcaggtttgtcaaagatcaggtggttgtagatgtgtggtattatttctgagggccctgttctgttccattggtctgtatctctgttttggtaccagtaccatgctgttttggttactgtagccttgtagtagagtttgaagtcaggtagcgtgatgcctctagctttgttcttttggcttaggattgtcttggcaatgtgggctcttttttggttccatatgaactttaaagtagttttttccaattctgtgaagaaagtcattggtaggttgatggggatggcattgaatctataaattaccttgggcagtatggccattttcacgatattgattcttcctatccatgagcatggaatgttcttccatttctttgtgtcctcttttatttcattgagcagtggtttgtagttctccttgaagaggtccttcacttcccttgtaagttggattcctgggtatttagcatcaactcttagaaaagaagaaaagctgttgtctgaaagcaaaaatagaagtatccaccaaggccaggcatggtgcctcacacctgtaatcctagcactttgagttatttatttttttgagtctgagtctcgctctgttgtccaggctagagtgcagtggggtgatctcagctcactgcggcctccgcctcccaggttctagcaattatcctgcctcagcctcctgagcagctgggattacaggcgtgagccaccacacctggcctatcccagcactttgggaggctgaggcaggcagatcacctgaggccaggagttcaagaccagcatggccaacatggcaaaaccccatccctactagaaatacaaaaaattagctgggcatagtggcgcacgcctataatcccagctgctcggaaggctgaggcacgagaatcacttgaacccaggaggtggaggttgcagtgagctgagatcgtgccattgcactccagcctgggcaacagagtaggactgtgtctcaaataataataataaattttagaaaaagaaaaaaaagggatccaacaaatcaggaggtttgacccaaactacaaacaaacagcttagaatgtttgttgtttatgattctgtctatagaattttccctcagttctgatcacagaaaggtgagaatggccccagggtcccagcctaagccccctacattagtttgctaggactgctataaagtaccatcaacctcatagcttactcaacaaacatgtatttctctcagttcgggaaggcacaaccctgaaatcaaggtgtgggcagggctggtttctctggaggcctctctcctggcttgcagatggctgccttctcgctgagtcctggctggtctttgctctgcgtgtccgtgtttcctcttcttctaaggacatccgtctacagcctcattgtaacctaatcacctctttaaaggttgtgtctcccagtacagtcacattctgaagtactggggtgcagagcttcagtatatgaatggggggcaaagttcagcctaaaacaccccctaatggtcccaaagagggcatgaacaatgatcacgtagccttggttcaaagggcattgtgaagtctggggaatagacagctcaccccctcgggtgccatgaggaagtctctgcacaggcccagttgtgagtccttgaggccacgctgagaacattgacttgctcatcctggaggtggaagtgggtggagaagtcagtgccactgactacctgccaggctctcaccccatcttttggcccatctgggaccaaaaacagtgccataaaccttccttgtcccaaccaaagctgactgtcaccctctctcattctaggtcagactatgatgactggagaccgtctctggccagtttgcttcaacccattccattccccaaagagtaagtcccgtgtgcatccccggagccctcccacctgtgagacaaacctcagttgtccaccaaggccttagtggggggccagtcatgttatggggaagcgaagtcacagcgggaagaccctggagacgtcggtaccagctcagccacgtcctcagctgtgggacccctggggaggcacatcttccctcagaaaaatggggaactcaggagaacagggacattgtaggagctgcttgactgcattgtcacaaggattcatgagctaagaatgcaaacagagccctccccatggctcctggcaggccgtgcagttatcgtcttttattatgcaccagatgggaaccgtaatacctgccgctcctcttccgagggcgatagtaagaatcaaaagataatgcgcgtagcattgctcgctgtgccgtactgagatgctggaagcgctctaattacgcccggtacaacgctcagctcaggctctgcagcaaacctggccagaaacagaccctctgcctctctcttgccggcccctagcaccatattgaattgatcactggaaactagagagaacgctgtctggtggataatggcctgaagagaaggctttgtcaaaataaccaggccctgaaatgcctccaggtctctttcaagaggttggaaggagcaagcctcgggaggcagctggggctctcgaaggagccgattaccaagcgtgtttaggaaatgctgcctctgtaagggcacattacacgcagtaattgccccatgtgctggcctggccagtccccgagggtccccagtacttgaggccggagaaatccacctcctaagaggcgctcagtctcagcagagtcgtgacgtcattggcctcagtccccgtccccataggcctgggcgctcttggctgtggcaactgtcttagaagaatggtcccccatggccgctgatgtgtgcagtaatgagtgccgcccgccttaatcgtggaacaattaatgaacacacctgggtctccggagcccacatgcacccacacatgctcaggcagcagcttagcccctcttattcacaggtgtgggcacagggaactttcgggaatggggggcccagtgtgttcatgttgctctgatctgccgcctcctcaaagaaggcctttgttttggagctttgagtggggacaaaatgttggcatttcactcacattcctcttcattctttgaatcagacataaagtctagacgtccccagaggttaatcttgggaacattgtgctgtttccgacgcttctgttaaccgccgtgttttcccctgtttttgttgcagagctctcgcacatgagaagttcaccaagtgagtgtctgggcaccgccctcattccattctggcacgcacggcctctgtcctgaggtcttccctccgtggcccatgcattctgggaggcagtggtggctcctcttggcagttctcttgagacacgtgtccctgatccaccgccttgcccagctccctggcccgttcttccttgacaccatcccctccccttcccacacctcccactcagttccagaccccggcagtaactccggccgcctcgtctcttccagggaactgaagtacgtgattcagaggttcgccgaagaccccaggcaagaggtgaggcctttgtttctgcatctcaggccggctgtctggggatggcaggatgcacgagggccccttagaggccttctgaagcttgtcaccaacaggcattcagaacagctttcagagacccattgcctgtgtataaacacatccccgcctggtgcagagcccagcctgtgatgtcagtgttttactgtaaacgccggctcaccgggggtggttttccactggctggtggtttctgcccgcagccgaggccttgatttcgggctgggctggcatggcagctctcaaccagctctgaggcagcattttgatcctgtctggttctgctattatgtgaatcactgggcagagcaaggaatctgagctgggattcagagctgggtttttatttcccggtcatggtggccaagggtttccctgaagggctgctgtgtccctcaccaaagctgggcttccagggagagggcagccttccaccttctgcccctgagcctgtgcacatgggcagggacctaggcaggcaaggaagccagcctgtagccctgggcccgcatcatctgatagtaacagcaccagcagctgtcttttaggaggtgctgtgccccgggtcacacacattccttttctcatgcctcacagcatccctgtgagtgtcttctatagtattcccagtgttgcgcggctggtccacgactgaggcaagattcgagcctggtgctgataaccatctcactgcactgtgtgctgtgctctgagatgctcacagcctgcttctctgtgtgcatgagttctgggtgtggtagcgccctaactcccagttgaggacagacctagactcgtgctcccggcagaacagggggaaggatgagcagaggacagggggagttcctctccatagagccatccccaggaggcttcctggagaaggtggtactgaactggctggacttagctaaatgggtcaaactggaccttagtctggagggtggagcatggtgtttgagaaggaatctgaggacacatggacaccaaggtcttgccatgtccaaccatggcaggtctctctgactcagaacccacagtttatcaggctgtaattccagaagttctagagtacttgttctcaaactatattacctgaggagcttgttcaaaaggcagacccccctgccgccgcatcccttcccggttccagctcacggggcctgggtggagccaagcatatgcgttttgatgcgttttgaacaagcatcccaagtggttctgaggggctggtctccaggccacactgaaaaaccgagttctggagggatcttgaagactctagttccaaaacaccgcaattctaaacaccgatttccctaagtgttcctcaggcatggagggaaaaaggagaaacggtggatatggtgcttttaaatgtcagggaccagtgagtgtctccatttttcttaaacttaagtctttccttgccacctgtgaagacagcgtctcagaattctcctgggaactgagccttaattcaaacccagcctttgacgctgggagaacaaaagtggcatcagctgcttctcagagtagagaggcagggccagctgctgggagggtaattctcaaaccagggaaatgtgcatgaggccccgagtgacctgccggtctggaaggagccagctcccctggccaaggtcccacacccaggcccttgttctcctgtttgcctctttcttttctctgctgattctctctcccttttcctcctcactcttctttctcccttcccttctaccttctccttcctaaatgaagccaaagttgtttcctttaaaattatttgctatatttgttgaatagcatctcaacactcctaagtccttattgctttgaagtcgataagggaacccttgatattcttccagctcagagggaaaaataaaagccactgcctttgttttctgtgtgctcgtgtgtgggttgtgatcagtttaatatctgtgggtaacagattcttggcagccaatcgtcctttcctaaaggaaatgatgaggaacttctctcagctttcttcggaggacaggaggaggtggggaaaagtcctttgtgtttcctgcacgcccttgctctcatgctctgtctctctccctcactctccccgctctccatcctctccctccttccctctctctctgtgtaatcacagcaggggccagagtggatgtggaattcctcccatacacacacacacgtgtgctcacatgcacaaacaggcccatccacacagacacacagctctgggaaggaatgtgagagctgtgcttttggcactgaaattgcccccagccacggacagatccttcagtggagggggacaaagactcagggaaggaagtggggatgagacctaacaagagagggtggcagagtcccaaagagggggagagagagagagagagagagattagcagggcagatacctggaggggaggatggtgcctgcacaagtcaagaaagggagggcagaaggcacacacccaagagggagagtcagtgctgggggcagcagaaccccagagaggcagcagggagaggtttctagagaaagagggcagagagcacgggagaggagttagaaacacagagagaggaggacagagaaccaaacagagaacggagacccaggagatggccccacccagaggaaggcatagcagaaggagaaagggggcaggagaaagggaaaaggggctgattgtgggcggttgctctgggcatctctacctgctgcagccacaggcccgcttcattcagatcagccaatcaagccggggcctgccctccctcctgtgcagctgacagccagtagccagagtcccctggggtgtgggggccacggtatttcccgaaagacctttcatggcatttggtggaaggctgggggttgctggaggaaacaaagttaagcgggtttcttgactgcaggacttgcctgagcctttcccattcatgtgtgcagatcatggtcgcccttgtcaccggggctgcatgcagctcacacttgtgtcttcccttgtctggcaggtccactcatgcctgctgagcgtgcgggccggcaaagatggctggttccagctctacagccccggaggggtggcctgcgacgatgacggggagctgttcgccagcatggtacgcagtgggaccccagtggggtgacttccaggggtccctgggcttgccatgcctgactagtaaaacagccgtcccccatcccctggggccagccccggagtttcccggctaacacagtgctgatcatgaaggtggtggtggtggtggtggtgatggtgaccgtgactgtcacttactcatttcttatctgaggctccaagccaagcacttggctttcccagttgcactcagctctcacagcacagtgagaagacgacacatgtcattgccccattttatacccaaggcagctaaagcctgggccgttactgcctaaggtcacacagttcattgccatggttatgttcctacaagaaattgagtgcccaacgggaccagggattctggaaggcactgcaggtccaccagcttgtttaatccttacaaggaggtgtcgcggtcagggggattgttcccactatcatgaggggtctgaggtcaccaaaccaatagctgcatccatgataactttctttgtgcccggcactgtatccggcacttcatatgcactatccttttttatctgtactgcatccttgttgctgaattacacctctgttgaaacagaggcccacagaggttcggtggcgtgcctggggtcccacaggccttctgtttccaagcccttccttggccaggcacacatggcttcttccaggagtaaagggccacagactcttcctcccccagggcagatgctgcaccctagtggccagcagcctcgccgactccacttgctgagaaaaccagctccatttactggtcactggtgctcccacactcaaactgggcttccagtcgcagctctgctgggagctagcttgttgaccttgggctggtaacttgcctctgccagcttcagcccctcgtccgggagcctcgcattggcctctcgaggttaccgcagcgatcgcatgcaacagtagatgcacggcgcccggcgggccggcacagtcgctgctcggaaatgacgccggtggtgattctcctctctgctgggtggctggtttggctgtccacactgaactcagcagagatgtttgtgcagcgatgacaaattgaggcgctgcccctgggagcttcttgaaaagggcttatttttaggccctttgcctcatgcactccctcgccactcctcgccggccaccccaggcctctcagggccctgcgcatctaggaacatgcctgcccctgccagcctgcaccacctctctcgcgctctcggtcacctctcgggttctcctctgatgtcacagcttcaccatagcaacgctcagctgcgcccccccgcccccgcccccaccctacaatgtgaggattcggtgcaagaaagcgcagggagctggcggcttcccagcccgagagattgcatttgtatgccagagctgttcatgatggagcggaaaaaatatacacaaggaaggaagcaggcagccgctggatggaagtgtgttgttgccatggagatgcatggcttggaagccggccccttgatgaggctgctttctccaccgccaagggcatttgccattgtgtgaagttggaggaaagccaatggggtgtcgaggcctccccccagccccggtgaccggggacccctgcccttgggcccccatcgcccatgcaccagaacaaaagaccgcccaacacataacccaagaggaagcaggatttgccaattcttggattcctggggcgcaggcagtctcccaaaacacccttccgagctcacagcgggcttggcagaggtggctgggcttcgtcacgtcccctaccccatacatgtgcgaaggctgcctagaagtttctacgtggttccagcggtgccaggaattcaaaggatcaactgtcagcagactcccgaggggagcaggggagggggcttttttgtttttggcagtaaaatacacatcatataaaagtgtgcatctgtaagcacaccgttcagtcacactgaagacattcatgttgtaacacaaccatcaccaccgttcatctccagaacgttcttatcttccgaaactgaaactcagcatccattacacactgactcccccttcctcccggcctcagtccctggcagccacttttcctttctgtctctgaatttccctatccaggtacctcatgtaagtggagtcagagtctccttctgcttaaaacttcaacgtaataagtgtttcaaacatcagaacttttataatggcaggagattacatatttagagattctattacagattcttgaaaaaactagcaagggccgggcacagtggctcacgcctgtaatcccagcactgtgggaagccgagttgggtggaccacttgagttcaggaattcaagaccagcctggccaacatggtgaaccccatctctactaaaaatagaaataaattagccaggtatggtggtgcatgcctgtaatcctagcttactagggaggctgaggtgggaggattgcttgaacccaagcggcagaggttgcagtgagccaagatcgcaccactacacactccagcctggacaatagagcgagactccatctcaaaaaaaataaaaatagcaagggctacatttgtttaaatcaagagaccttaaattgcattctagtcagcttttattgcatttagtattatagatttatacaaaagatacccttgctgagctggggcttatagttaaatcaggtactactaaaaggcaaaagacagaatgaaaagagggatcatgaacgtgactttcgcgactggcttattccactcaacatagtgtcctcagggttcatctgggttagatcgtgtgccagggaggggtttcttgcatccccctggggcctggtgatcctagaacacctggctgtctggacagcgtgtaggcaggtctgttcaacggctcttgggctcacttcctgccagcacgctggaggctggcactgggtgtctctgtcccttcacctgggccttcttgcctcacaggtgcacatcctcatgggctcctgttacaagaccaaaaaattcctgctctccctggcagaaaacaagctgggtccctgcatgctcctggcactgagggggaaccagaccatggtggaggtaaggagctggtcggggtccctggtggggtggctggctccccgtcccttgtccgtgccgatagagcatctgctgggagccaggagctgctgcaggcacggggggcagtgggtgaggcgtgcagtcccagccgtcctgagcttagtgggagcctcgagccttcatcatgcagtgtatttgtttctgttgtgatccagctgatccattgatcagtggggttggggacgcttctgttctgctcatttattgctgtgtaacaaaccacctctaagtgagggctttaaaacaagatcgttcatttcttttgcacatgggcattggggtacctgggcgcagctacgcacttctcacctggggcctcatcagtcagatggggccaggttgggttagccccaaggcttctcgcattggcctaagaggcctcagacaatgagggctttggcggctggggctccccagccgcacccttcacctcgtggcctccaggtagcctgtccacctgccaagaacacacacacccagccccacaggtcacccctcacctgctgctgctcctctctctccctgcacgctccaaagtccccagaagcctgagactcccagagcaactgtcccaaagtccccagaagcctgagactcccagagcaactgtcccaagggaaccaaggcagaagccatgtcactttttaacttagcctcccttggaaggcaggcggcatcacttctgccacatcctcctgctggcagtgagtcaccgcggccggccctcagtcaaagccgtgggagctagacttcacccctcagtgggaagagcatcgaagagttggcaggcgcagcaaagccatgggagctcccgtggaaatgagagttcgggcagatgtgagccctggggaagaggcagcgggaaggtgggagctgagcaggctgtggggacatcccgggcggaggcttgctggaggccagggtggctggaacacagggagccaaggggcaagaggtctgggatgtggctggatgggcatgaagagccttctgggtacctagaggtgctgggaaggagtttggatttaatcttggctgtcctgtgacagggattcggaggccatgggggagggctgagcagggagacaggagacaggcaagaggcgctgtgagaagcgtgggctgagtgacctgctccttggtgagtgagaagttctagaactgagcaccatggcatgcacctgtagttccagcaacttgggatgctgaggtaggaggatcacttgagcccaggaggttgaaactagcctgggcaacatagcaagacctcatctcaaaaaaaaaaaaaatcgtcattggaaagggaatgtcagaggcagggctgtcaggcgtgttgacccccaggccgaagagccacatgtgcagtcatgaggccctctaggaagctgtgtggtagatgggcccagggctctgagccattccgtgagtttgagcacctacttcatgacagccactggggaaggaactggggagagagaggtgtcttaacttctggcctttccaccagtgctcaggggcctgcaaacatcccccgggggcctgccccatgtccagacaccgcacggtaagcagatgcctgggagactcccatgtccattgacatttgaacctggagaacctcagtgcgtggtcactggtgctaccattgtacaagcaggaagttgggcaggtgatttgcccaggcttacacagccggggctgcagaaaggggatagtggggttgctggttttcaaaacaaggcccttggggtgcacagagtgtgctgagctagggtggcaggccgggtccgtaatgcacccctgcggttctggacagatcctgtgcttgatgctggaatacaacatcatcgacaacaacgacacccaactgcagatcatctcaaccctggagagcacagacgtggggaagcgcatgtacgagcagctgtgtgaccggcagcgggagctgaaggagctggtgagtccccggctgctccggaccactcccctgcccagcaggccagggggggccagggcgggatgcggggcagctagtacttggacctgagtggacctcaatctcgttgaattctcctccaaaccccagaaattggtattaccacctgccacttttcaggtaatcaaagagaagcaaagcaatccccagagtcacacagctcattggggcctggccaggacattgcccaccctccctcctccatgtcccttagacccttccatttcagtacatgggggacccaacttccaaatgccagcacccacacctctttgctgaaggactttgtatgtccacatgcatatactcacacatgtgtacacagaaggacggaaggggcaggaaattcatgccttctgatctcctggagcagccctcaaccagtcccttctggggagagtgtgtagaaataccccagctccctcaccccttcagtgagatatgtttgagacatggcttctccaccatttcttagagtcccccggtgggatttggtgccagtacccacccagtgatagctggattgataacaccccttccattataggtagccacagtgtcacttccccactctcccactggtgtttcttgggatcaccctccagtaaaccacctgtgctcaaacctcatctccgggtttgcccctgagaccaagaccaccgtgttgccttgtaccaccaagaaaataacgatggctccatgagtgttgttaacagaggtggaagtctagaatggaaacttggggaaaagaatggttgtaaccagcctggtttctgttgcagcaaaggaaaggcgggcccaccaggctaacactgccctccaagtccacagtgagttggtttggttctctttggggctggatggagaaggtgggttggtcctctctgttggggaacggcaggtggtgtctgctgctgagatgggaggtgatggagggcggggcacaaggaccccctagtacttaacacgccagctcttccaggaggtagctgggttacaggaagagaaatgaaaaccaaaaaggaagttaaaatatgatacagattgttggtgataatagtgttgatatctagttattaatagtacttggaataatagcagatataccttgagcatttgtgtgtcagatgctcttctattagtttgttttatcctcacagcaacccttggaagcttgtgtatcttaccattcgcatttcacaaggtctttaagggtcttatttccttctattctgatgcccccattatatttgacacatggcttctacttcctggaccaaaagggctgctcaggctccagacctcttgtctccattccagccagcaggaaggagaacgtgccccttcctcttaagaaacttcctggaagttctacttgacatgtctacttacatcccattttccagatttagtgtgtggggccacacactaaatcagccttcattccgggcagccacagggccgctgacactcaaggatggaggggagtgtggaggttgtcttaggaacctcccagtccggtgctcaggcatgcgctggtgtcttcaggcattagagttgagtgtggcctcagtgttggcatgagctgctgcccaggagtgaggcagccagtcacacaccctgatgcacagacacagacacacagagacacaccaacacacacacacacaaatatacacagacgtgcacagacacacacatgtacagacacatgcatacacaaacgtgcacacagacacacacagatatacacacatacaggcacacacacacagacacacacacacacagacgcctgtgggaggatcgtggccttggaacaccccgctggtgcctcagggtgtgagtcacagcactggaggctttctcctccgcctggcagctgtcgtccatgggatgcgtggcagcccctccctctctggccacccccttggcccatcccaccgagctgtgcccccatctcagctcctgggatttaccgccccccaggaacagctctctgtagggcgaggggagaggaggaggataggggataggagggctcagggtctcgggaactcccagcagcaccctcaggcctctcccccgtctgcccgcaggacgctgacttggctcgtttgctgagctccggctccttcggaaacctggagaacctcagtttggccttcaccaatgtaaccagtgcctgcgccgagcacctcatcaaactgccttcgctcaagcagctgaacctgtggtccactcaggtacgtcctcccgccctgctgcagtcccccacaccctcctccttcacctctgcactctcctccctattcccccgtaccatcttcctttcccctcagcctcctccctgccccctccccctccttcctgccccctccccctcctccctgccccccttactctcctccctgccccttcaccctcctccctgctcccctcaccctcctccctgccccctcaccctcctccctgtcccccttactctcctccctgccccctcaccctcctccctgccccccttactctcctccctgccccttcaccctcctccctgctcccctcaccctcttccctgccccctccccctcctccctgccccctccccctcccctacccacttaccctcctccctgccccctcaccctcctccctgccccctcaccctcctctctttcccctcaccctcctccctgcccactcaccctcctccctgccccctcacccccccacccactcaccctcctccctgccccctcaccctcctccctgtcccccttactctcctccctgtcccctcaccctcctccctaactcgttcaccctcctccctaccccttcatcctcctccctgcccccgtcaccctcctccctgccccctcaccctcctccctgcccctcacccgcttccctgcctacaccccaggcattgcttaccacacgacccttccctcaagctcagcacccactccctgaggctagaggaggttgaggacctcatgaagccctgcagcccatttcccatttggaaataatgtgcccagttccgagtcctgaggttctgagaggtagagctgagacgtgagccaggcttcgctggcctgcggggggctgcgcaggaggcttctgggtctttttgttatagtaacaccagtggctgctgagtcccagctcagtgtgaactgcactgctcagtactctgcacagggcagatgaaggggccttcactgcacacctgtgaagtgcaggttctaccctcaccctaattttccagaggagaaactggggacagtccctgcagcctgcccccggcccagccctgtccttccactgtccacccagcaggagaaagccacctaggcagcatctcgaagctagggagagacaagttcaaagccctccttcatggaggcaaaactgactccaagggggccctggcctggctccactcccaacagcagaagctggattctaacccggttcagagaggcgtgggattgtttaggggacgtgaacgcagcccagaccccagggcttggtgggccatgggcctcagagccaggctctgtccccatccctttcctccacctctgccccagcctcagagtcacttccccaggagtggccgggagagggctgagagtttctgtgctctacagtttggagacgctggccttcggctcctgtcggaacacctcaccatgctccaggtgctgaacctgtgcgagaccccggtcacagacgctggcctgctggccctgagctgtgagtgcctccggggcagctggggggtgaggggccgcttgattcattccttccttgcttcagccaaactggccaagcactgactttgcaccatgcacagatagagaaattcgttcattcacaaacgtgttcactgcacacctgctgtggaccaggcaccattccatgtgccaggaacaacacagggaaaaatatccctaacctcagagagcttatattctagaggcaatagaaaaaatgagtaaggccagcccatagcctcttgacactcacagtccactgaggggtcgagttcaaggacggggctgtagtacattgccactgtggtcccctgaccagtggtggcagcgtcttctgggggctggtcagaaatgtacattcccaagcccactccagacctcctgactcagacaccgtacggtaagcagatgcctgggaggctcccgtgcccgttgacatttgagaagccctgtcataatagaaggaggcacagaattctcaaggaacctagaaaggccagttcctgtgtgccaaaccccaggtgactgaactagcctcagggatattgagcccgggattctgtatttgaccagctttcccttttccaggcccactgctttagacgggaagacccgtggctcagtgggaagagtcagaaaaggcttcccggggaggtgctgttgagtctgggtgtgaagacagatttgtgggagttggccaagggggaggcaccctgagcaggggccatgactcctaccgggccgctggcaaatgctgggtggcttgggaggaggtgggagcaggtgactgggtcagtggaggcagagcggcagcgctcggccagtttggctgcaaatgcagatgcgctgcttccactggagtcccccgggggggcgcggtcctcatcaacagcacagattcctggtccctgctgcggccctgctcagcgtctctgggagtgggtggaggggtctgccccccgtgcgactccaacacaaaccagaggttgaggcttgctttcaagaagcagcaccgagtcaatgacgacggggggaccatccggggttcccttagtggggaggcctcgggcctgatctggggtgtggcaggcaagctctggggacatcaggtccaggcagtgggggcacacgacagagggaccagaagggagggaggctcagagggtgggaagaaaacgaaggctctgttcagaccagcacgtgcctgaaatagactttcggtgtctagtgggccacctaccctggctgtgtctacgaaacctccctccccagccccatctcctaacagggggcctggcacctgcattgagctcctccagcttggccatcccataccttcatacctttggggcctcgctctcctaacaactgtatctgtctcttgtgcagccatgaagagtctctgcagtttaaacatgaacagcaccaagctctcagctgacacctacgaagatctgaaggtaattccctccttcctccccactctcctcccctccttcttctagccagcatctggatgctggtgcatctcctgcacagagctcgttctccagtaaaggatgatgacatctacagatcaatacataaaataatggcagatcaaaaagagtgacaaagaggaagcagcagggaagtaattggaaataggaaggcctgtgtggcctggggtgatcagggatggtgcctttgatgaagaggccgcaggagctgagacccaaaacataagaagccagaaataccaagggcgagaggaaaagcaagtgccaaggtcctgagacagaagagatgggcgaggcctggctttgcagcaaatgtaaccaggaactgagagagggaatgggctggggccggatggaaaaagccctcacaggtcacagcagagcagcgagtcatgcttttcaaagcatgctctggctgttaggaaataaatattttgagagggagcaggagtagaagcagggagggttgagcagggctggtgcctcaccactgagggctgcgctgcaccggcactaggccagcaagtgaaatccgggaaagaaaaaggatcggagggtggaaggcaggggcgttttaagaaacacacgtgcacatcttgggaaggttggaggagccaggccctcagtcgcctcctgtcaccccgtcctcctgggcctgtaccagctgccccagaaggagcgggcgggactggcagagggccagcatcctgggagagaagggctgggctcaaaggtgagaaggcacagatggcacccgtgagccacgctggcaccttcgtgctctggaagctacttagagggaatcccccggcagcccttggccggggcccacctcctacagccaggcctcctgccgccagggcgtgctcactggggcatcctccagatgcttctggagcctctgctgtgtaccaggcccatgtcagggacagggacaccgaggtgtggctgccacagtccccttccgggggatagtccctcctggcaggcacaggcaagctcagcaaaccaaggcgggcagagggcctggtggggccaggagggacagtcggtagagagcgaggtccaagagaggacgtatgggacacagaaggtggcaggggcacagccagcagatcacccatcccagcgtttagacctcagccctcagggtggcgtctgcagaccagcaccctcggcaccactcgggggccaacagaaatgcaggatccaggccaccccaggtaaccccaccctgggggatttctgggcacactcgtgtttgagaaatgctgcctggattatcttgagttcaaagtgctgaaagtcagatgctactgtgagaccaagctggaaagagaacatggggagtgcaggaaaggccccttgggaagaaaaatcactttcagtcgatttttttattttcacacatttgagagagacatggtgccaacttaatgctgccagcctgtgaccggcctccctgtggaggggactcgagcaaacagcagctgcctgtcctttggaggaggggcctctgctcagtgccaggcaggccacgccccactgttcactgcccagtctggccagaccttcccatttttcaagagaaccttgaaatctagattcgtctgtgaagtctcctaattttgaaaggctggcttagtatgctttatagcactgcaggtggctgcaggtccccacctgtaacctctgcctgggcagtggggagccattgagggttgttgagcacaggagagcagcagcgaggaattgcatgtgcatgtgtgtatgtgtgtgtgttcatgcatacatacgtgtacatgtatccaaaaagtgtgctggccagtgtacaggaaagttgggagggaggatgtaaaggcatgaggccagttaggaggcagctacctctctgtatagtggaggcttgttaagaaaaaaagccaactgttcataaagaaaagtggaagtctgggtagcagaaacagaaagcagaaaacaatggagagacatagcaggtggaatcacagagtcgagtaatgcatccagcctagggggagcctcaagtgggaagaatctaagccaaaccctgggtacctgggatttcctgggatccacgtcactcaccctgtccattctctgataacgatgagaatatcactaacagtaaaaatgagaacaatttcctttcatagggcatatacggtgccctgggctttctacatttggtatttaacccctagcaccatcctttgagccagggactagagtcagatgggcccacagaggaagaaactgaggcccctagaggctgggttatctgcccacggtcacgcagcagcaagtggcagggcctggattcaaaccccagtgcttccacctgcgaagacagagaccaaaggccatctgaggcgggggcatgggaaccccgctgcctggtttctccggggccagggcacatcccacctgctctgttctctgcctaaggccacccacccctccaagagcccaggtagcccacagcaccaaggtggggagagggtggcagagacccccagccggcaatgcgggtggagccaggcactggcagcttctgcaagggaatggcctacacgtgacaaggactcttattgccacccccaggccaagcttcccaatttgaaggaagtggacgtccgctacaccgaagcctggtgaagctcccagctcaaggcaggaagacgtttgcaaccgcgacaaaataactcttgactaacagccgcagagcagccggtcctggggtcccaccctggtgccctggctgtgagatagatggggagtctttctgggggcggaggggggagggggtggggagggggcccacaagcacgcccagcccccgccgaattcttttagcttcgtaattggaacctttgacctgatctaaagtggactttgtagcaacaagaggagcatcagcgggtcggggaggggtttgggggtgggctggggggtgggggaccctttgtggattttctttgcctttgtgtttgatgccgtcgtgtgggaaaagtcaactccgatgccaccattgcgggccggacgaaggatgctttcttcctagaggctccgagctgagctgcgaactcgccccccgcccttgggacaagaagacccagtcacatcactgcacccgtcctgtgtcctcaccattgctatgcaaagtgattcttgttgtacataagatttaaataatgcacctatttaagacatgttgacaaattgcgggtctgggacccgcctcttatttatgaagtctttgaccgtcccccccgcccgaccccaccgccctcccgcccccacctggcgtgtagtactgtataaaccagtcagctgtcgggttagtggtagtattattgttatttttttaaaggaaacaaacagacaacaaaaagaagaaaaaaaaaaagaacctccttggaaaaattaattgctttttcgtaatggattctctatgctaatgctctctcgtctgtctgtctgtctgcccactcccccacccaccactgtgcgtttctgatttccaaatgtctccaactccctcacgaggtggggctcaggctggaggaggagggattaagatccccttgctccactaaggcccaagctctttctctcggcaccttttagacttgaatgggaggctgctaacccgccctctccagtccaccccggtaaaagagctgttccccacccccagggagctcctgtccctgtcagcctttgctgtcccctgtccccaacggagactctgtcacccctgggctccccctgccatcgtgtgcttcacgtggccccatgcatgcccgcctctctgcatggtctcttgggaaaagagagatgtgtcgcctccgccagtccgactgccctccccaccccacccccgccaccccccacatgtgaccactgcaacgaagacactccttctgtccccacctgctccgaagacaaaccaacctccgtttcttttataaacagtcggctttttcttaataagccctcactgtacagaacagcccgttgatggtttatttggggtccccctctccccccagcccttttttctgttggtttagcacaaatacttccctcctccggcacctccaaacctaccccacagtcagtgtacttgttttatatatatttaatcttattcaatggaaaccatgcttttgtcgttttatactttgctaggtagactttattacccccccactatgccctcatttttttaaaaaaggaaaaaaaaaagaaactgggttccagtcttaattcattttccgtgccaggttttatttcgtgtgtgtgtgagtgtgttctgttttgtgttttgttttttgttgttgtttttagttgtttggttttcttttctttcccccctccggtcccatacttcacagcactctggtgcgggaagaagcagaagcaaaaaaaataaaaataaaaaaataaataaaaataaaaaaaataaaaaaggaaaaaaaaaaaagaagaaacaagacatgccacctttcccctcgcactgttgcttttcctgatggttaatactactgtcacgtagctgtgtacaaagagatgtgaaatactttcaggcaaaaataaactgtaagtgactcatcaatgtctggcctttgtgtggtttctcggcgcccagcgggagaaggtccaaggagggggcgaagcccaggcgggaaatctgaggctcaagacagtgccgggatgccctcgccaccttctgtgcgcacttcctgaggaccagggctcagcatcctggctgctgttggccactggggccggagctgtcttcgttgcaggggggctgttgtgttcattgccagacattgaacagcatccttggcttctacccagcagtagcaccccttccccatttatgacaaccagagtgtctccagatgttgccacgtgtcccgtggggggatagttcgctccccagctgagactccgtgtcatagactgaggtcagtgctgctgttcagcagggccttacgaaagctgtagcccagagctactccaaggaatgtgccttccatccacctagggggtcttgtgaaaacgcagatactgacgccatagcgctaggtggtgcctgggaatctgcattcctgacgagtttccaggtgatgctgtgctgctggtcaatgccaggttcctagacccacacttcagctgcctcctccccctagatgtctccaagaggcaatcttgacaagtccaaaaataaatgctttatcttggccaggcacggtggctcactcctgtaatcccaatactttgggaggccgaggcgggtggatcacaaggtcaagagatcgagaccatcctggccaacatggtgaaaccctgtctctactaaaaatacaaaaattagctgggcgtggtggcgtgtgcctgtagtcccagctattcgggaggctgaggcaggagaatcgcttaaacccgggaggcagaggttgcagcaagccgagattgcgcctctgcactctagcctggcgacagagcaggactccgtctcaaaaaaaaaaaagtaaagaaaaaatgctttatcttcacccctcttcctaaaccagtcacccttcagggtcccccagctcagcaggggtatccttgtcctcagcccaggcatgtcctgcctccacatgctgacagaaatccaggatgtccacgagccagtcctctgcctctccaccatgggcccggcccgaaaccagctctccagagactctgtgtctggagttgccccctgccagcccccaccgtccccacaccatccagctccctctgctacctgccccacctctctctatgccctggtggcctccttccagaggcctctgccaggtctttttaagacaggtgagaaggctgggtgcggtggctcatgcctgtaaccccagcactttgggagcccgaggcgggtacatcacctgaggtcaggagttcgagaccagcctggccaatgtagtaaaaccctatctctactaaaaatacaaaaattagccgggtatagtggcccacacctgtaatcccagctactgaggaggctgagacatgagaatcacttgaacctgggaggcggaggttgcagtgacccgagatctcg

SEQ ID NO: 112 - DNA, 39547 bp, Homo sapiens
  source 1..39547: mol_type = genomic DNA
tgcaacttttcatttcctatttcctacacacacacagacacacacacacacacacacacactccccagattaacatgccacttaaagcttctgcctacattttcatcttgatatttcctaccccgacctgaatgctgttttcctgcttgtaccatgcagcttcacttcacacctctggtcttactcaaactccctctgcctggaatgcaaatcttctgtcaccttcacttggctaattcctgctcatccttgaaaatctagagagtagacattctccaagaagcccattgcttccatctttatcaaggctttgtctggtgtgccttgattatctgtatctctcataagaccatatgctcttctgggctgggatcactaaatcattctctttatttttagaacccagtacaggttgctgagccatgggggtgggagatgatatgcagaaccattgacgcatatttctttcgttaatagagtaacagcagttttaaagactaaacgtggaattcataactgcaggaagtagctgcttcctgagaacagtgtgaccattacatgtcattacggtgcctttccttcgtctcttttctccagagacctaggcttgctgtgtatttcattaaatggagggatctgagtgttcacctgaaaaccaggtttttaaaattctgtatcatttttatagactttaattggaaaacaccagtattagggatttactgtggaatacacaataataaggtatattctgaatatgagagtgtagtgagatcatggcatcaagacctttctgtcgtctcagaatctgtgttttggaaaacttctattttccttaggaaagttgtttatctatcaaacggtgggatgcaaaactgaaatgtcaaaaatataaaatacctgctcatcctcttgatctaatatttcaatttctaaagacagtccttgttcctgagagactttatgtcattatacataaataagctattcctcctcagctgtatctgccaagcaacactgtcagccctgtaactaggagagtaacttattggtaattggactacagccgcagcctgatttgtactacaaaggtaaaaatcattatgcttcttcatgcccagtgaccacttactgaaaacagattgagaaaggtgtgaagacctgcttttcagaatgtcaataaagtccttcctccccacaagtctgatttatcttcgactgcatttttctttatcctagtgctgtttccctggaggtgactcttaacacaggtcacatgccagtgcactcaaataattccccatgagcttccagattgaggctaaaaatgttcacttttaggtagattccattatatatcctttcctttttctgtgtgtttttatctgggaattctggggacaaaaaagattaagaacagttgaggaattctgtacaaataacaatgacttattttcatcatgacttaattaaaaggagctcaagtgtacaattgagatttttggcaaactgtaaattttcatgtttatttcaaaatagctttggaagatacaagcaagggaagacttatggcaaagcaatgcaaataaaaaataacaaataataaaggggttatggcattttagacttgaactaccctttcagtacatttgcatatactaaagttctggaaaacaattgaaaaaattctgttaagagtgtcaagaataaccgctcaggttgagtgtaaaaatattttgtggtcctatcagcatcaacctgccttaatgcttctttggttgtctcttcagctagttcttattttacagcacatgatatatgaagtgatttcacaccatgcccaagatacgggccacccaccagctacatggcatgatgactctgcaggccgaacggcagccttgataattataaggccatgggtaatagccccccaggggttcacagatcttctggcagtgggtgtagctccgcctacattctatacaacagattccttcgtgatccagtctagggtcgaatgtcatgctttccccttcctgctgctgtgaaataaaagataattatttgtgataactgcatagtgggaaggtcatagcatgcatgttatttttaaataagattctgaatttttcactgctacaggaaggtgtaatctgtaaagggtttgatcttgtttaccctgtcattcataattcatgttcactgctgtcattcataattccttttgacaccaaggaatctacacctacctcacctgtcactgactagaaagttgttttgtcttttaaaacgatatcctgaagtttctccatgcctttaatgaactatggttaccacttagtaactcagcttgttttaagtaggaaagcaagaaggaagcattatgataaaaagtagcatttctgccactgctaattctaagtcagtggaatgcttgtggcttcttgcagtaatagcttccagggctctagaagcactttttgaaactcatcaatctaggctaaagacagatttcaattccagttgcactggctctgagaacactgtcaagtcatttagttttctcctgctttcatttcagtaacagaatggggatgttatctctatagggacaaaggggtctcaggaaaagactccacaaaaacatgtaaaattcaaggccttaaactttgccttctagttttttatgtaaatatataaacacaagattacattggtgaagtaaaaatctccattttcactgctggtgagattacagaactggaaggaactcccatccctccaaccctgcccggtttacatatttggttttcctttttggggacttgtaagggtggagattctgcattatttttaatatggtattgaagtgcattcccaagaaacccttatctttaaattcttgattcaatttaagattctttcctaaagttagctgattctggtgtttaaacaaagtctttaatcttaatttgggatgtcggggagtggggggagttattaaaaatttcagccacgcgcagtggctcatgcctgcaatcccagcactttgggaggccaaggtgggtggatcacctgaggtcaggagtttgagaccagcctggccaacatggtgaaaccaaccccatctctactaaaaaattagccaggcgtggtggtggacacctgtaattccagctactcaggaggctgaggcaggagaatctcctgaaccaggaggtggaggttgcagtgagctgagattgtgccattgcactcccgcctgggtaacaagagtgaaactctgtcttggaaaaaaaaaaaatttcaaacatactggagagtagagaaaattatagattgaacaccaatagactcatctagattggacaattgctaacctattgtcaaatttgcttttccccttcctgcaacagcaaaagatagggaaataatttatatgtccatcaaagcaaaactagtattttaaagtaaattctgaagtgaatttaaagagaattggaggaattgtgacatttcttccataaatacattagaatgtgccccccaaaataaggatattttcctaaatttacaaccagattgccattatcacaaaattaacaacatgatctgatacaacccatattcaagttatgtcatcaaaatatttattatcttactcttaaagcattcattttttaattcatcagactcactctgttctttaccttatttcttgaataggttaatctgggacagcaaaaagacaacaacctcatttattaattatgaggcagggagagttaaaaggcctgtcagttgaggcacttccttatctgaggacctgacaaaagttttaggattgaaaggttgggaggaaatctcatgttgttaccctaagatatgttttttaaaggaataactgaatgagatcatggagataaatgctttaaccatttctgcttaaagtccaacatataataaaggaaaaaattgatataattggagtttttcaagggataaaggtcactcaagactggatccaaggcaaagtcatatcctgcctgtctataaaggggctgatgccctcaccccttgagccagattcagccagcccagctctctagggaataaacagtattaaattttatttgcctattcagattctttttattcttcttcaagctaaggtagtaaagtattgtggcatcctgaattttctgataagcctttggttgtttagaaaatacttcttgctccaagcttttctaaaatatttttaaaatgataaactaggaaatatatttgcaacacctgaaatagtgttggactgaataggctacatagaaaaacgtgcaaatgacttagtatatgaaaagatgctcacccttacacataattaaagacaagcaagataaacaaccaggagatagaatttacacccaagagattggtgaaagttttttttaagtttggtaagaagtgggtcctttcattactgtttgcagacatagggctgatgtaattccttgaaaggcaatttggtatcctccattaaaatgtaaatctacttcgatgcagcagactcatgcttcggtatttatgctaaaggtagacttccatgtgtgtacaaagaggcacaatactaatagctaatattgagaaagttactgttcacctatgtatctcaagccctgtgctaaaagagctccacctgcattacctttatttactcctcataatcctgtaagtcatgtacaagattgtatcctgtaacagtatttgcaaacagcaaaagacagggaaataatttatagccatgaaagcataactaaatttctgtacatttatgtatacaatgagttactattaaatgaatagtagtcattaaatgaatgaggtactatgtaggaaaacaatctccaaaatattgtaactggaaagaaagcaaggtataaaagttttgtgttaaaagtgtgtgtgtgtgtatgtgtgtgtgtctgtgggtgtgtacttatgcaaagaaactggacaaatagtcattgttaatagtttgctttggggagggtgtctggagtggaagggaaacacttttcttaatatatccttttgtactgtttttaaaaaatttctgcatgtatttttaatttaatttattttttagttgaagtctcactctgtcacccatgctggagtgcaatggcgtgatcttggctcaccgcaacctcagtctcctgggttcaagtgattctcctacctcagcctcctgagtagctgggactataggtgcacgtcactgtgccagctaattttttgtatttttagtagagacggggttttaccatgttggccaggctggtcttgaactcctgacctcaggtgatccacccacctcagcctcccaaagtgctgggattacaagtgtgagccaccgcgcccagcctgtattttttattttaaaagctagctacaaataaatacctattctactttttcgctccctgaaaagtataatggtaaatattttgtggaagatttgagtttttagcacctcgtgtcatcctcacaaacatcacttttcagtgtttcagcctaaagcgttttacatctaagtgtgggtctatcctctaactgaagtgagagcccctgagggcagatgacacctcgtgtcatcctcacaaacatcacttttcagtgtttcagcctaaagcattttacatctaagtgtggctctatcctctaactggactgagcccctgagggcacagtctcctgcctgtgcacagagcctgggaaagagcaggtgcctaaatgactgcctgttgaataaagtggatataaagggggaaagagaatacttccattccatatgttgcctccagggagcactctaggaaacattttcaaataatcaaattcctgatatgaatttgttttcatgaatttgcctgtgactcaaaaaaaggagagcacagaaaacaactgaataataagggttaccagccaatcaggattttacactacagaggtaatgcttaagtgttcttacccttaattataaaccttgcaaaaggttgggcgcggtggctcacacctgtgatcccaacaacatcttgggaggccaaggcaggtggatcacctgaggccaggagttcgagaacagcctgcccaacatggtgaaaccctgtctctactaaaaaaaaaaatacaaaaaattagctgggcatggtggtgggcacctgaaatcccagctacttgggaggctgaggcaggagaattgcttgaacctgggaggcgattcccaggcagtgaaacaacaacaaaaaaacaactttgcaacaaatgaaaatgtatttttaaaataattgaataaaagtctaagttgaatacttatatgcgcgtttgaaacctcaagtacaaacaccatttcaacactattttttttttttgagacggagtctcgccctgtcacccaggctgaagtgcagtggcccaatctcggctcactgcaacctccatctcctgtgttcaagcgattctcctgcctcagcctccggagtagctgggattacaggcgtgtgccaccatgcctggctaattttttgtatctttagtagagacagggtttcaccatgttggccaggctggcctcgaactcctgacctcgtgatctgcccacccctgcctcccaaagtgctaggattacaggcgtaagccaccacgcccggccttggcactatgtttaatgcatttgtctaatcatgtcaaaaagcaccggaacgcacatgataaggattatcaggattgaaggcttgtgagtcctcttgaacactgggtctggtttcattattcagtcttccagcgcctgggttgctccgtggtccactgtgtggtctttttgtggtagttggaacaatttttcttaccacttctcttctttccctctggatttctgcaaaaatttctgtaaattaatccctttatttgaataattaaggaaattagatctgtgtttatcagggtgaaaaacataagaaaaggatatcaaaatttgtgcataaccagatggcttaaaatttttgtactgatgtttgtagtaataaaacatgttttagagtcttgggctaatagttaaacatacagataatctgaatttggttttgtaatactaattgaagatgacattgtaagatggcctgacaaacctcaagaccacctcccccctttcttttggtctgccttcactactggggctgagaaaataaaacaccattcatttccccagcttcctttgcaattagaagtggccaggtgagacatatctgaccagggagacatcagcagaatacgctagtgcagtttctgggaaagcttttgctttctcggtaaaaggggacagataggcttccctgtcttgtttttcctttcttgaacacagatgtgatatctggagttatgagagtcaacttgtgactatgaagtgataggcaccataagccagcatgctacaggtagtaaaatggtaactggaaagagacttgatggtatcattgagtagctgatagtgtcaaaaacctcctctctctagacttctggctatatgaaaaaaataaacctgtgtttgttgaaaccactgttgatcaaatattctgttaattgtagccctaagtatttctaatggattgactatatcagtataaagctttacagtttgcaagggaaatatcttggtttattctttttaaaaatcctatgggatagaaaaagcaaatgcttttatatatgagggcatcaagcctcagaaaggccaagtgacttggccaagatcacagaatgggtggcataggtaggtgcccagtgcgaactccctggctctagtttaccacatagcctcatgggccctgcagcagggctgatggctgccaattaaccaaaatacaggccaggagcagtagctcatgcctgtaatcccagcagtttgggaggctgaggcaggcggatcacttgaggtcaggagttcgagaccagcctggtcaacatggtgaaactccatctctactaaaaatacaataattagccgggcgtggtggcaggcacctgtaatcccagctacttgggaggctgagacaggagaatcgcttgaacctgggaggcagaggctgcagtgagccgagattgcatcattgcactcaagcctgggtgacgagtgaaactccatctcaaaaaaaagtagaaagtaccacacagcttggattttggtgtctctctgagcccgtttcgttatctgtaaaatggggataatagtaatatctaattcatagggtagtgatagggttaatgagaatctgtctaaaggtttaagcagtgtgttgcatataataagcactgaactattaggtgatgaggattatatcatgctttgttatttaggagaactaagatgtgctttaaagccattggtagcttccacagatagcatggttggagaggcaccagtgagacctggatttgatcacagttctgcttcttttaactaactaaatgaccttaggcaaattacttatctctgtgaaccttagtttcttcatctataaaacgggaacgagtagttaccccaacagttgttggcaaagattaaatgaggacaaagcgtaattctctactaccatgcctgacacacagagctcagcaggtgtcagctctccccgttcccctctgacctgtgtccagctgtcattccccgtgtctctgataatacagctgtgtgacactgatgacctgctggcttcaagatccaagggcatgggccgctggaccctggagtgtggtgcttttattagaattaggtggtaggaagcctggcatcatcagagtttcttgattgtattgtaaaatataactgtacttatgagagatgggggaatccatttttcatatctatgatattccattttatggatataatcaacatttaccttttctaatctgggggcattgaggtgttttccacttttcttgtgtacataatatgtgtaattcttgtatggatgttgtggtgattgaatacttaaaatgtggtcacgctattgggctgggagggaacaagccacatcttggatatgtagggaagaagctctttccccaagtgagaaattactcatcctatcagttgtcttagcattgccaataatgctgtgttccgatctctagtgcccaccccatggccctgcactggcattttccatagcaccttgtatcatattatacaattttcttattttaatttagtgtttatttactgtctccccttgctgcaatgcaaaactccctgagggcacgggttcttgtctgttctattcacggatgcacctcaaatacctacaacaagtttatggcacgtactaggccctcatgaacgtctgtcaaatgagtgaatgaactctctgggtaagaggcttgtcctcaatgagattagggagagctctaactggtagcacactgcagactcttgtcctcagctggaaaagatgggagttcctgggcgacagaaagtaagaaggcccacccaggtggtggcaggtgtggaacagaaagccagaacttggcaagccatcatagaactgtgagttgtgaccacccataggagcaagagcaggaatggcaacagcacagcccatttggcagcccctctcctgcccccttcagccagccagcccctgctgactgagtttggaattctttcttactgagcctgcatgtggtctccagctgtttctcagcccactgtgctgggcagctactgccagtggcttgtcgctgaatcctatttgcctcacccaggctggagaggagccatcttctccagctttgggacagaatgagacttgtgaaccataagaataagttagtcgtggcagatcagaaacctgtacttcctaagcctggtgggtatttttaaaaattgtaaaatatacataacgaaatttaccatgttaaccatttttaagtgtacagttcagtggcatgaagtacattcacattgctgtgcaatcatcaccaccatctagaacatgtttcatcttgcaaaaaatgaaactgtacctattaaacactaactgcccagttttttccctgtgtgcccaccaagcctagtggttttaaaggcctatattttctttatttccatgctgctgtctgctagtcttccataaaatctttcagaaaacagcctatctcagctgtgctaggagaaaggccttttttttccccacatttgaaccagagctacaaaataggcctttgggaggccagtgtggtgactgcagtagaaatagtgagacaactcaggggacaggagaaactcaggagggagagtgaggcccaccaggctcacctgcccttcattacccagaaatagctcaaagatatgctccagcctagctgtgaaccccagggagtctgcacttactttcactggacttggaagctaatattcaagctctgaacttgagaggaatctcagccaatacccatagcagcttttggctgtcccataattctaggtttgaacacaataaagactcggcggtatgacagtttcttagtcccttgattctatgccttagaaataaaaaaaatgtaaaattggaaggtgcaaacaactgagataaaggggcagagtggaaagaagtgggagtgtcataaaccaaagctgcaggtaatgccatggcattgtcttcctgatctgcctcctgttaaccctactgctccttcccttcccttcaatagtcacgggctgtcattttcctgctctttcatctctcatgctaattactgagacactgcgacatgcatcctgatttatcctccttgttaacatgctcaggcctgtggagggggttggaggaacctcacatgcatgaacagggaaagttgtaaacagcttaagataatttaaaatgttaccttttggataggttggtttaagccagaaaataggaaggtcaccgcagagttctaacaccttagaactcaagaagctgttgtccttcacaggctgatctacagccacccagataagagaattttcttcatatttgactggcatgatcttgccttcctgaaagtaaaaacgattgcatttgagcaaagaggacagtgaaacaaattgtattaagagtcatgtgttgctaaaaggttattttgccttataaaaaattaatgagaattccgagcatgcgtgtgtacatgtgtgcactttaaggttctaatctcttctctttgtagctcttttcacaatattcagcacgcctcctcctgttgccctgcctctggatagctgtaccatgtgaatataagtgccctgagttgaagtgaaaattacttgataccaactttgagatttaggttaatctgatgtttttgatcaaagatgtttttgaggaaaagcaattgaacgaaccctggaatcctacaaaggatagaggaacccttcatttgaagtgaaaatcttgtggggttttgttctgcagcttctgaacaacaatggaaaaagcaagtgattggttctttaatgtcttcagttcaaagtattatttaacataaaccatttctccacttcccagctataacaacacatatttcagatgttcctcacatcaagcacaccactgagatttcaaagttaaaccctggattttcttccacagtgagatgctgagaatggtttgataacccaggagacaaatttatcctgccaggttgttcctttcgtgtacttattagtctgcaatagcttggagaaattaaaatgttttctcctaatttttagctaaaagcagtacttcatttatgctttctccctcaggcttatggctgcattaaaacaacttaaagttattggaggaagctaacagtcaggtaatccagttatttaccttaaattaaatggctccatccaggaaatgaatgctctttgagtactgtagctttttaaagttatacaaaactgatgaaaaatttatgaaagcaagtggtacataaatctaccccatcttagtctaaagtgtgtggggaagagtggggtgattgggataatgcatatagatgcatcctccatgctaagaatgttaaataaatcttgaggcatgtacttttggttgcctacccaatctccttcctcccccacctgccttgtaacatagtccttcttttattggaagcagcaatgagcccagccccaggagagacacttgctttctctagttctcctgcagtccagggtgcccgggtgacccagtggtagccagtgagatccaggccaaagtatgctgagggcttgggaggccttctgcttttcctgattaaagggaagtcgtggttggcattgctcaatgtctttcttcctgacatttttacttgaatgccaactaaggaagtcaggaagaggttgagcagtggcaaccatgattggagctgaaaggcaagattttaaaaaatcacagaaatgctggccaccgagccaatgcctgcagccacctgcctccacattgcttactgtggagaaaaacagatcccgatttgtgtaagttactctaagggtagttttctgttactgacagccaaacatattcctaattcacacaaatgtattgtctgaatttgtttttgtccactagaggatccatcatgcatgacataaacaactaaaacacaggacaaataatctacctctatggcctaagaatcagatgcagacaaagatttaaatataaaagcattcaccatcacggcgaatttatttaccatggtaaataatggtatttaaaaatagttatttttaattattatttgaaataatgaaaaattgaagatacctgaagtgtttaagaataaaagacttttaaaattataatcatatgataaagcatatgtccattataatctacattttagaagaactaaagttatgacaataataagcatgtacaacaggataatttcccttatagaaagactatcacacacacacacacacggagaaaattcaccaaaacattagcattagctttttgtggattatgcaattgtaggtaattttattatctatactttttttccctaagatgtcccagtattgaaccatttgtacatccctgaaataaaccttaccttgtcatgacatgttacttattcaacatatggctatactccttttactaatattttagtcaagattcttacacctattttctttttttatttttaatttttgtggatctatagtaggtatatacttatgggttacctaagatattttgataccagcatgcaatgcataattaccacatcagggtaattactgcaagcatttattctttgtttcaaacaatccagttatactgttagtttttttaaaaatgtataattgttttttactacagtctccctgctgtgctagcaaatactaggtcttatttagtttttctattttttattctttataactaatttttgtacccattaccatcctcccttcccccaaaccgttccagcctctggtaatcatccttctattctctatctccatgagttcaactgttttaatttttttaaattatactttaaattctgggatacatgtgcagaatgtgcaggtttgttacataggtatacacatgccatggtggtttgctgcatgcatcaactcgtcatctacattagatatttctcttaatgctattcttcccctagcactcccactccctgacaggccccggtgtgtgatgttcccctccctgtgtccatgtgttctcattgttcagctcctacttgtgagtgagaacatgcagtgtctggttttctgttcctgtgttactttgctgagaatgatggtttccagcttcatccgtgtccctgcaaaggacatgaactcatcatttttatggctgcatagtattctatggtgtacatgtgccacattttctttatccagtctatcattgatgggcatttgggttggttccaagtctttgctattgtgaatagtgctgcaataagcatacatatgcatgtgtctttatagtagaatgatttataatcctttaggtatatacccagtgatgggattgctgggtcaaatgatatttctggttctagatccttgaggaatcaccacactgtattccacaatggttaaactgatttatagtcccatcaacagtgtaaaagcattcctattcctccacatcttctccagcatatgttgtttcctgactttttgatgatcgccattctaaccggtatgagatggtatctcattgtggttttgatttgcatttctgtaatgaccagtgatgatcaactttttttcatgtttgttggccacataaatgtcttcttttgagaagtgtctgttcatatccttcacccactttttgatggggttgtttctttcttgtgaatttgtttaagttccttgtagattctggatattagccctttgtcagatggatagattgcaaaaatttgttctcccattctgtagattgcctcttcacgctgatgatagtttcttttgctgtgcagaagctctttaatttaattagatctcatttgtcaattttggcttttattgccattgcttttggtattttagtcatgaagtctttgcccatgcctatgtcctgaatggtattgcctaggttttcttctagggtttttatgattttaggtcttacatttaagcctttaatccagcttgagttaattttgtataaggtgtaaggaaggggtccggtttcagttttctacgtatggctagccagttttcccaagaccatttattaaatagggaatcctttccccatcgcttgtttttgtcaggtttgtcaaagatctgattgttgtagatgtgtggcattatttctgagggctctgttctgttccattgatccatatacctgttttggtaccagtaccatgctgttttggttactatagccttgtagtatagtttgaagtcaggtagcatgatgcctccagctttgttctttttgcataggattgtcttggttatacgggctcttttttggttccacgtgaaatttaaagtagttttttctaattctgtgaagaaagtcagtggtagcttgatggggatagcattgaatctataaattactttgggcaatatggccattttcacgacattgattcttcacatccatgagcatggaatgtttttccatgcgtttgtgtcctctcttttttcattgagcagtggtttgtagttctccttgaagaggtccttcacatcccttgtaagttgtattcctagtattttattctcttttagcaactgtgaatgagagttccctcatgatttggctctctgtctattattggtgtataggaatgcttgtgatttttgcacatggattttgtatcctgagactttggtgcagttgcttatcagcttaaagagattttgtgctgaggcaatggagttttctaaatgtacaatcatgtaatctgcaaaatgagacaatttgacttcctcccctcctattagaatacactttatttccttctcttgcctgattgccctggccagaacttccaacactatgttgaataggagtggcaagagagggcatccttgtcttgtgctggttttcaaaggaaatgcttccagtttttgcccattcactatgatattggctgtgggtttgtcatagatagctcttattattttgagatatgttccatcaatacctagtttattgaaagtttttagcatgaagcggtgttaaattttattgaaggccttttctgcctctattgagataatcatgtgtttttgtcattggttctgtttaggtaatggattatgttgattgatttgtgtatgttgtaccagccttgtatcccagggatgaagctgacttgatcgttgtggataagctttttgatatgctgctgcattcagtttgccagtattttattgaggatttttgcatcgatgttcatcagggatattggcctgaaattttctttttttgttgtgtctctgccaggttttagtatcaggatgatgctggtctcataaaatgagttagagaggagtccctctttttgtattgtttggaatagttacagaaagaatggtaccagctcctctttgtacctctggtagaatttggctgtgaatccgtctggtcctgggctttttttggtcggtaggctattaattactgcctcaatttcagaccttcttattggtctattcagggatttgacttcttcctggtttagtcttgggagggtgtatgtgtccaggaatttacccatttcttctgaattttctagtttatttgtgtagaggtgtttatagcattatctgacggtagtttgtatttctgtgggatcagtggtgatatcccccttatcattttttattgtgtcatttgattcttttctcttttcttctttattagtctggctagtagtctatctatttgttaatctcttcaaaaaaccagctcctggattcaatgatttttggaagggtttttcatgtctctatctccttcagttctgctctgatcttagttatttcttgtcttctgctagcttttgaatttgtttgctcttgcttctctagttgttttaattgtgatgttagggtgtcagttttagatctttcttgctttctcctgtgggcattttagtgctataaatttccctctaaacactgctttagctgtgtaccagagattctggtacattgtgtttttgttctcattgatttcaaagaacatctttatttctgccttcattttgttatttacccagtagtcattcaggagcaggttgttcagtttccatgtagttttgcagttttgagtgagtttcttaatcctgagttctaatttgattgtactgtggtctgagagactgttatgatttccattcttttgcatttgctgaggagtgtttttcttccaattttagaataattgtgatgtggtgctgagaagaatgtatattctgttgatttggagtggagagttctgtacatgtctattaggtctgcttggtccagagctgagttcaagtcctgaatatccttgttaattttctgtctcattgatctgtctaatattgaaagcggggtgttaaagtctcccactattattatgtgggagtctaagtctctttgtaggtctctgagaaacttgctttatgaatctgggtgctcctatattgggtgcatatatatttaggatagttagttcttctggttgcattgatccttttaccattatgtaatgcccttatttgtcttttttgatctttgttggtttaaagtctgttttatcagagactaggattgcaacccctgctttttttgctttccatttgcttggtaaatattcctccatccctttattttgaacctatgtgtgtctttgcacgtgagatgggtctcctgaatacagcacaccgatgggtctggactctttattcagtttgcctgtctgtgtcttttaattgcgggatttagcccatttacatttaaggttaatattgttatgtgtgaatttgatcctatcattctgatgctagctggttattttgcccgttagttgatgcagtttcttcatagtgttgatggtctttacaatttggtatgtttttgcagtggctggtaccggtttttcttttccatatttagtgcttccttcaggagctcttgtaaggcagggctggtggtgacacaatctctcagcatttgcttgtctgtaaaggattttatttctccttcacttatgaggcttagtttggctggatatgaaattctgggttgaatattcttttcttgaagaggttgaatattggcccccactctcttttggcttgtagggattctgccaagagatctgctgttagtctgatgggcttccctttgtgggtaacccgaactttctctctggctgcttttaacattttttccttcatttcaatcttggtgaatctgacgattatgtgtcttggggttgctcttcttgaggagtatctttgtggtgttctctgtatttcctgaatttgaatgttagcctgtcttgctaggttggggaagttctcctggataatatcctgaagagtgtttcccaacttggttccattctccctgtcactttcaggtacaccagtcaaatgtaggtttggttttttcacatagtcccatatttcttggaggctttgttcattcctgttcattcttttttctctaatctcgtcttcatgctgtatttcattaagttgatcttcaatcttggatatcctttcttccttccacttaatggatttggctactgatacttgtgtatggttcacgaagttctcgtgctgtgtttttcagctccatcaggtcatttaagttcttctttaaaatggttattctagttagcaattcctctaacctttttttcaaggttcttggcttccttgcattgggttagaacatgctcctttagctcagaggagtttgttattacccatcttctgaagcctacttctgtcaatttgtcaaactcattctccatccagatttgttcccttgttggcgaggagttgtgatcctttggaggagaagaggcgttctggtttttggaattttcagcctttttgcactggtttttccttgatgttggtgacctttggatggggttctgtatggatgtcctttttgttgatgttgatgctattcctttctgtttgttagttttccttctaacagtcaagcccctctgctgcaggtctgctggagtttgctgaggtccactccagaccctgtatgcctgggtatcaccatcagaggctgcagaacagcaaaaattgctgtctgttccttcctctggaagctttgtcccagaggggcacccatcagatgccagccggagctctcctgtatgaggtatctgtcaatccctgctgggaggtgtctcccagtcaggcacaggggggtcagggactcacttgaggaggcagtctgtcccttagccaagcttgagtgctgtgctgggagatccactgctctcttcagagctggcaggcagggacgtttaagtctgctgaagctgtgctcacagccgccccttcccccaggtgctctgtcctagggagatgggagttttatctataagcccgactggggctgctgcctttctttcagagatgccctgcctggagaggaggaatctagagaggcagtctggttacagcggctttgaggagctgctgggctccacccagttcggacttcctggcggctttgtttacactgtgagaggaaaactgcctactcaagcctcagtgatggctgatgcccctccccccaccaagctcaagtgtcccaggtcgacttcaaactgctgtgctggcagcgagaatttcaagccagtggatcttagcttgctgggctccatgggggtgggatctgctgagctagaccacttggctccctggcttcagccccctttccaggggagtgaatggttctgtcttgctggtgttcctggccccactggggtatgaagaaagacttctgcagctagctcggtgtcttcccaaatggccacccagttgaaacccagggccctggtggtgtaggcacccaagggaatctcctggcctgcaggttgcaaagaccatgggaaaagcatagtatctgggctggaaggcactgttcctcatggcatggtccctcacaacttcccttggctagcagggggagttccccaaccccttgagcttcctgggtgagtctatgccccaccctgctttggcttgccctctgtgggctgcacccactgtctaaccactcccagtgagataagccaggtacctcagttggaaatgcagaaatcacctgccttctgtgttgatctcactgggagctgcaaactggagctgttcctattcggccatctctatatatacttttatgtatctctcaaatttcctacagtaacacagtattgtttttaaaaatcagggaaaaatgtatttaaaaactcagaaaatatactgcaaacttatgattaaatctgggtcagccattgttggggaattggtccttgtagaaggcaggagaggagaacaagttctgggtccatttgtagggaaaatggcaaggattatagttcactgaagtcttcatgacagaaactgagggatatgactataaaaaatggtaatgcaataagagaagttcaagggtcagaacaaaggaggtcttggtcccatttttatacttggtataacatacttgcaccgagaagacgacctttgattctgaacagcacagctcataaggaaccagctggaacaccatcaggagagaatgaccagagcaaggaaggtctggaatacatctcacaggatggatgggaaacagagtagaaaagagaaaacaggaaatggtagtcagctttacaaactcacgggtttgttttttagcttttgtgttgttctgttttgagacaccgcctgcagctgctcctatgggggcaaacaatcaggcagtttccaggcgcctttgctaacccatatagttttcctcttttgccttgagggagctgatacttgctttccctccctctcaggaatactgggaggatcaaagatgatcataataaaattaacaacaatgagcagcagccatctgtcaaccatcaagtagatttgagggccatgggcactgtatgcatacccccagcttacagatgacaatatccatagggagtatgagagctgagatgtaaatccacgtttttctgacttcaaagcccattttctctccactctatcctgccacaactcaaataaaagacagtaatcaatgggaccattttgtaagccctaaactaccattaaaagtaaggtattactgttaaatgtgtctttagaattctgtatgcaattcctaaagtaaattttaaaaaaatcaagctcaaaggcaagttattaataataaatgaaagaaacatgttttaaaaactcacaggtttgacacatagaaaaggaattagatatatgttgtgtagcttcaatgggctgaacctgaaccaatgggaagaagttgtaggaggagctatctcagcttaatgtagggcaaaacaattagaaccaccctcagtgatgctggctggtgttggggtgggggatgagtgccctgtggctgctttccagcagaggctgtgtgatccgctattgtgggtccctttaatgaagaccctgtcttgtggagtcctttgtctttattgtggagtctctttcgggtttttttattttttgagatagagtctcattctgttgcccagcctggagtgcactggtgcaatctcagctccctgcagcctcaatctcctgggctcaagtgatcctcccacctctgcctcctgagtagctgggactataggtacgcactaccatggccagctaattttttgtatttttagtagagacagggttttgccgtgttgtccaggcttgtctggaattcctgggcttaaatgaactgcccacctcggcctcccaaagtgctgggattaccagcatgagccaccatgcctgcctctattgtggagtcttaaccacagatcagatagttccctaacctcaggcaaataaggccatatgagcacccagcccctttatgcactttaaaatgtggcttcccaaaacgtttaaatatactatatcatgtgagaagaatcccttgaccccagtaggacaaaaacagtttgaattcctttggcagagaagaaatcgaatttaccatctagtcatgaacctatccaggtactagaaaccaaaagtgttgtgcctttaggctgggcgcggtggctcactcctataatcctggcactttaggaggccgaggcaggcaggtcacttgaggccaggagttcaagaagagcctggccaacatggtgaaaccctgtatctattaaaaatacaacaagttagttggatgtggtggtgtccctgtagtcccagctgctcaggaagctgagacaggagaatcggatgcagtgagccaaaagcgccactgcactccagagtgagactctgtctcaataaaaataaaaataaaaacaaaaaataaaaaccaaaagggttgtgccttcaaacaatgtttgccaagcagtctcactgtctcaggcatgttggtacccaccagtttggaggagatgctctgtttggtcacggcgcccacctcaggaatacgagccttcacttgcgctttaatgtagcacttctctcctccagcaaaacgaattcctgtgatgccctatgaaacaaaagtgtatccatctatctatccatttgttcatttattcgatttattgagtgtctactgtgttccagatgctgttccgggtgctagggatagggatgaacaaaagagatggaactgccctcatggaacttaccttttagcattgtttaccaataataaaaaacagccgggcggcctggcgcggtggctcacgcctgtaatcccagcactttgggaggccaaggcaggcagatcacgaggtcaggagatcaagaccatcctggctaacacggtgaaacccgatctctactaaaaatacaaaaaaaaaaaaaaaaaaaaaaaattagccaggcgtggtggcgggcgcctgtagtcccagctacttgggaggctgaggcaggagaatagggtgaaccggggaggcggagcttgcagtgagccaagattgcgccactgcactccacagcctgggcaacagagcaagactccgtctcaaaacaaaaacaaaaaacaaacaaaaacagccggacatggtggcttatgccaccagaactttgggaggccgacgcgggcagatcacctgaggtcgggagtttgagaccagcctggccaccatggtgaaaccttgtctctactaaaaatacaaaaattagccgggtgtggtagcgggctcctgtaatcccagctacttgggaggctgaggccggagaatcgcttgaacccgggaggtggaggttgcagacagccaagatcgccactgcactccagcttgggtgacagaacgaggctgtctcaaaaaaataaaaacaaacaaacaaacaagaatagagataaagtcaggtaataactgttaagaagaaaaataagacaggaatgatgaggtggtaatttagacagacagcatagtcaggggaggtgactcaatgaggggatgatatttgagctgggacagaatatgttagttattccatctatattcacaagctcagatgaaatgccaccttctccatgcagccttctctgaacatctcagcctaagcagctgtctttcctctgctttcccataagtcctcctgtcttcattcctcaactgggatgcttactcagctatacacagcctacttagttataagcttcttgagatcagtatttgaatcttttctgttttcttttttggtgaccccacaaagctattcaaaagatgttggtcaaattaattaattctgtgaattcagaattttcctaggttactgagcccagagtaaacagtaaaactttctacagcacctggttctgaactttccttctataccttacccaaggacttagatgttttttttttgtctcctgagagatataaacaatatcttctcttggtctgcctagggactgcctcaagggaaacatcagccacaaagctccagtcttggctgaaagcacagccccgattctacccacagaggacatgaggggtaacaggatgctctgtcccaagaatgtttactctcctcctgctgctgttagtttcaggactagtgaatctaaaataaaggcctacaatttttatggtataataatggagatactagcacaaatctgaaccttatcagtcctctgttgagttgaggcaagtgttggaatgatatagaaatggtaccagggccagtgataaagaatgggggtagaaaacacttaaaatctagggatcctggctcaagattcagccctttacaatgaagaagaaaattaaatgtaagtcatgctggaggggattaatggatagctctaccttatgtagtcacagagccaggagccctacagaagctggtgagtaaaggactgcaaaacacagaagaaaaggctcattcttcctcaagctctttattatttgtcttgtggcttaattaatcatgtatacatatgtaactcatttcacctatttctcccagcactactgctcactcagagagacaggggcattatccccactttacagaagaggagctccgaggctcactgctgaggcttggctcttaactgcacctgaattcactgtagagggtttaagaacacagacgcctgggtcccttcccagagattcccatttgattggtttgctttggggcccaggtattgggagccttaaaagctccccaggtgtttataatttaaagggttgatgccagggttgaagactaccatatgaaagagaaaggtgttcaaggtaacaaagcttttaaagtgatggcaataacctttggacccaagtttctttttatcagtggttcacaaaccttcccttgtatcaaaaatcccctgggtccccagcaaaacttcagaacagtcttcattaacaaccacaccttaagctaccaagaaaaatcacagacaccaccgacgctgtttacagctaaaaaaaaaaaaaacatacagagactatactactgcatgcacccagaatgaaagctgaagtgccctacctaaccaacaccaaaagtccacacctatgaaagcaaatttaaaaaactgtaataagcaactattaaatcagatgcacagatatcaacacaaggacacaggaagcatgaaaaagcaataaaacatgacactcccagaggaatacaataattctccagcaacagatcacaatcaaaaacaaatttatgaaatcccagaaaaaaaattaaatattgatattaaagaagctccgtgagatacaagagaatactgaaaaacatgacaaagaaatcagaaagacaatttaggatatgaatgagaaatttaataaggagatgtatattatgaaaaagaacgaaatagaaattatagaactgaagaattcattgaatgaaatacaatatacacttaaaagattcaacaatagaagccaggcacagtggctcacacctgtaatcccagcactttgggaggccaaggtgagtggatcgcctgaggtcaggagttcgagaccagcctggccaactataaaccccatctctactaaaaatacaaaaaaataaaaaatagctggccatggtggtgcacgcctgttatcccagttactcgaggctgaggcaggagaatcgcttgaactcaggaggtggatgttgcagtgagttgaaatggcaccaccgcacttcagcctgggtgacagagccagactccgtctcaaataaaaaaaaatgattcaacaatagactatttcaggcatctcagaacttgaagagaagtcttttgaaataacccagtcagacaaaaataaataaaaaagaataaaaaagggccaagcatagtgtctcatgcctgtaatcccaacactttgggaggctgaggcagaaggactgcttgagcccaggagttcgcaaccagcctgcacaacatggtgagaccccatttctacaaaaaaattttaaaaattagctaggtgtggtggtgtgtgcctgtagtcccagctacttggaagggagaaggatcactggtatatatatatatatccacaatggaatactatttggccatagaaaagaatgaaatcatgtcatttccagtaacatggatggaaccagaggtcattatgttaaatgaaataagccaggcacagaaagacaaatgtcatatgttctctctcctatgtgggagctaaaaaagttgatctcatggaagcagaaagtaatgatagataccagaggctgagaaggatatatgggtggagctgggggaatgaagacaggttggttagtgggtggtaaaaacatgcagttagacagaagaaataagttctaatgttcagtagcagagtggggtgactatagttagcaacaatgtattgtatgtttcaaagcagctagaagagaggacttgaaatgttcccaacacatagaaatgaaaaccaaataccctaacattatcattacacatcctattcatgtaacaaaatatcacatatatctcataaatatataaaatattatgtaacaattttaaaaaggcaaattaaaaaatcacctgggccagggcggtggctcacgcctgtaatcccagcactttgggaggccgaggcaggaggatcacgaggtcaagagatggagaccatcctggccaacatggtgaaaccccatctctactaaaaatacaaaaattagttgggcgtggtggcgtgcacctgtagtcccagctactcgggaggctgaggcaggagaaacccaggaggcagaggttgcagtgagccaagattgcaccactgcactgcagcctggcgacagagcgagactccatctcaaaaaaaaaaaaaaattcacttggaggacttgttaaattaaacagtgttgtgccccacccccagtttcccattcagtaggtctggggtggggcctaaaatctgcatttctaacaagccaagtgatgctccactggcagcctgaggaatacacgtggagaataactgctttctcttatgctacctcctgtagggctgctgctcttatttggcatgtaaatttaggactcatagtttgaaaaacagaaggcagggagggagatgatgccttcttatgtgacattttctcttaacttcaaacacatcccctgaatgtgagatgtgtggagggaatgcacacatctccgtcaccatatccccaaaggggaaagctgattctactgaatgattcgcagcactgaatgggaatctagtgttaagttggttctgacagtcgacacaccgcagtgagaactgaaacccccatggggtaggaagtgtgggaaagaattcacacatattaactaccgtgtctagcaaaaactccacatcaagcagccagatatattaagagattaaacagagggaactaaaagaagcacaagaaagccaagcaaacctcctgtttttgcaaacaaacaggctttagaagctggtggtaatgaagaaatttgctagcaagggtgatgagtggagagtccaagaatctaacattcttttttcaaaacagtgatgtaatcttaccttggctgcacatttttttctttctaaggtatctcatctatttctatggcttaaaccagaggttcccaaggatggtaggagttcgtgtccccaagagggcactttagaaatccttggagaagtttcttgtcacaaagattgggggcactcctgacctttattgcacagggcccagggatgtcaggtcctgcagagcctgggacagtcctgaagaactaattgtcccgggttggaggaaaaaaacctgtttgtaaatatcagtgtctagaacccagtgttgttttatatgtaaacacaaagtaatttttggcatagtcttaatgtacaacaaatttcctaggaatgcaattactgtgaaatggagagaaaacagtacttttcttcactgtttgagaaaattacatagcatttaaattgccaacacacacttgtgtctgtctgcattttgggctgtggcattgacagtcattcagctactactataagtgtttgactttatatcttctagtgcatctggctgaacatttacatatgaagtccatatttttaatataaattagtttcatttcatttttcctttaccttatagttggaggctgaattgacaggttatgctgtctttactttctctagctttttaaataaaaatttcaaatattcacaaaattaaaaggattatacagtgaacccccatatgcccatcagtttattctttcaatttcttttttttaaaattttattattattatactttaagtttttgggtacatgtgcacaatgtgcaggtttgttacatatgtatacatgtgccatgttggtgagctgcacccattaactcgtcatttagcattaggtatatctcctcatgctatccctccccccaccccacagcagttcctggtgtgtgacgttccccttcctgtatccatgtgttctcattgttcaattcccacctatgagtgagaacatgcggtgtttgcttttttgtccttgcgatagtttgctgagaatgatggtttccagcttcatccatgtccctgcaaaggacatgaactcatcattttttatggctgcatagtattccatggtgtatatgtgccacattttcttaatccagtctatcattgttggacatttgggttggttccaagtctttgctatcgtgaatagtgctgccataaacatacgtgtgcatgtgtctttatagcagcatgatttataatcctttgggtatatacccagtaatgggatggctgggtcaaatggtatttctagttctagatccctgagtaatcgccacactgacttccacaatggttgaactagtttacagtcccaccaacagtgtaaaagtgttcctatttctccacatcctctccagcacctgttgtttcctgactttttaatgactgccattctaactggtgtgagatggtatctcattgtggttttgatttgcatttctctgatggccagtgatgatgagcattttttcatgtgttttttggctgcataaatgtcttcttttgggaagtgtctgttcatatccttcgcccactttttgatgggatattctttcaatttctaaggctttttgttatataaatggggcattcagtccaagggggttggcttaaagcaacagcactggtgcttgtgagagtataactagaatgtaactcataaagtatgaatgaacttgggttttctatctctcagggtggagagcctggagcacttttttcagtgctatcctccgtcgggggttgttttcttccacggggttctactaaaatcttggtggggtcctggacgaaccggggagactgttcatttacaattcaaaaccttttataatctagccccacctgcatccccatcttttttccttccccaagttgggctgaactgggctacttagaattagaaccctggagcgagactgcacattcatgttcactatttttccctgggcctggagagccttcccctacctgtctgacagttgaaatcctgattattcttcaggacctgatttggtcatcactacatctgcaagacctgccccagtcccctattcaggaaggatgttccctctctgttcataactcattggaacacgttttccaagctaaactgaagctatgtctgtgtgtacgtctgcctcctgaactgaactgaagggtccttgagggaagggtccatcattttcgcattccgcctgcttagcatcatcccttgcacacagcatgtctcaataaatgcttcttgaatttgaccgttgattcaaaatacaggagaaagtaatagtgtaggtaccatagtggctgattcatgtgttttcaaaagttcaggcttgtttaaacccataacaggttctatccatcaaaaaaaatgttctactcaccagttctgacttagagaaatgtggaagctatcaaagagaattgatcagtttataaaatatctatggccctgttggtctatgagaacaaaacacaatcgataccattattagaaaagaaccaaaggattataaaacagaaatataggtttgggattaaaatatgttaaaagagtatttttgatacatgaacatctcaagaaagatgaatcgtttcttattcgtctttgtagctccctttgcatatcttaatattgtggcacaccacaggcattcaatttctggattgaataatgtgtgttggggagtcacattttattagcttatattgagtagtacaaagaaaaaatgattttaccctgtcctgggtcttgcagtaaaagcctttaataagtgcagagaaattatacttgtgcattgagcagaatcatctgcaaagctatgactaaacaaagtgcgtctgggcacatacagagcagcagaggctgtccccagggcagagaccattctgaacatagtccttgtcatgatcaaataatatctgacatcacaatagctctaatgttagcatctgttgggtattcaaatggacttatgaggtatattttggtaccaacaagaggagtgctttcactcaaatgaaaagcatctttagcttttctcatcaatcagaggaagatgggtcgatgaggtgtttgtggaccaataaactatcagaagagacattattttcaagaggcttttttcattatgaagtttcacctactccatctgcagatttaacaggagtacacaaatagtgatgcctcttccttatagtaaaacatgaaagagcataaaatatttatgttggccaacaggaaattcggcctgaagtgacactttggtttgcagatgtacaccgaaacattgctgcacagcttaatgtctcaaattgcctgtaaatgaaatttttgttaaaaaatcaaaacaaaacagtctccttttcaaaggagatgtgaatgttttatctctaatatgctatggtaacatgctatggtcagaaaacatatgctataataggagaatttgctcatggtcattttctggattaaataggaaattggaattgagaaaagtatgcaaatagatcccacctgttgttgatgagattattaggtcattaaaatttccctcttcttcagaaatttaaatttcaaatcttgcaacattcttggattgttttgagcattttattcatcacgttacagaaatccgcttgaaaagaaatagctccttcaagtctttctgccaagacttttatataattccaagaagaacctgctcttttcaatgctatggtattgtggtttttttcttccagttttaaaaatcaagttttattttgatttctagggacatacctttaatttcctagaagtaaaaaatgtttttcaaaacagctaaatccttatgtacatgaattcagtaaaggtggttctttttgtttttggtattttacaactgaagtgttgtttttttcttttgcaaatatgaaggacaaagtctggtcctttctcagagagaatatgctacatgtagtggattagtggcactacaactgctataaagaacagttaccatttggatgtgtgtgagaaacgctgctcctccttgaattagaaaagtcccgcaggcttgcctggttaaattctctaaatgcatgaaatatacttacattctggaaatcattaactgcaattgcttcttcagctccacttcccattttaaaggtctccaagttgttcccagcgtctatttccattgacccatcttgtaatttcccattgatactcatggtgtaatggacattgtaaatctgaaagtgagcataagagttagtgatgctttcttttttgagcaattcagggcttatctttagaagggcagtgtatgaggtagtgtccatatgtttcagagatacatgagatagtccttaataataatacatttatatatgatgacttcattcatacaacaatcagttaatgcaatgatttccttaaaaataccttaagagtaaagactttggttgcctctgacacctattccaatagctccataatttgcaatgctggctgtactttagaagcatctgggtagactctctgggtaccatgcctgggtttcaccctggacaaatcaaatcagaagctgtgggaagggcgcttgggcataggtctttctttttctaaagctcaattctattatgcatctgggttgagcactattgatggataaatggaaattgaggaggcagaaggttaattgggctcccagctgaacacgtctgcagtggcacctcagtttcacaagttgttttcatcctttggtcaagattaggcatgcagtgtctcaggtatatggtatatggtattaggtatatggaaaggactgcagacaggaccagggtatgcttgatatagagcagcatgtgtggagaggaaggccaatgtgcatgtttgtttcagctcaaaatggtagtactccctgaacgattctatggggcaggcccatggtgctgtagggcattttgttatgagatgtgtggggagtgtggaagaggggaagggacctggcactgcagaagagcatcggtccagtaatcaggaaaacaggtggccacaccactcatctctggatcttgtgagttgccacgagtgtataatgaagttggacctcataggtggctttcatctatgtccttagaactgttgggatctcccgggcatggcctagaggtgaggatggcactgtggcactctgttctctcctgtccatccatagtctaaccagagtggctctgctttttctgtcttatgtgttgcatttctgagtaacattttgttagaaagacaaatttcaatacttaaaacatttcttttttaaagtttgccactaattagctgacctaaagggctcagacacctgattactgcactggtttcaaaataactcagacgctgctcctgctcagtgtgctgctgtcctggtagacctttctgtgtggcagagctaggaggtgggtttcttttttttttggatttagatgcataggtatatctatatatcttacatatgatatattacatatcatgtataaattatagattatatatacacatatatataaatctttaaagtggaggaatgagaactgatgaaaaactgttgctacttaatatcaggtcagccagtcaaaactgcaaatagctcagatccaattcaagtctgatttttcttcctcattatgaagagtgactgctacatgcacaaacactggaaaaaggatctgttattgttggatccatttcttgaagaaaactcattattacaagacccacagtgcactattttattatcagcagagatacagaaatggctttgctatccagcacccttttaggaacagcattcattcagcaggacagaaaataccagtgtcctttttcagctcaaccatccctcattgcccctccttccctgtctctttctgaagaacttagatgtctgcaatttactgtctcctaggcttccctgatcacaagaaccactcctgggggttctgatttagtggagctagagcacagcccaccagtctcttttcccctttcccctcaggtggcccttatgatcagccaggtttgggaaacctgttttctttggctgagacgggactcctgcaggtgaagtttggaaagaaggctctgttctgtccggtgctctctgagcagccagtgttcatatgggtcagtgatgactgtcagaaggagcctggcaggaaacacccatgtgagtgtcttccactcatatgacaagaggttctgtgtttttttttaagaacattgcacataagcttttactagtaaagcaatgcaacatttaagaacataaccatttctaaattcttagcagttcttaaggagataaggttgtcacactagaagagtggcctgtggtttgaatttcacattcctccaccactacccctggctgtcttctccccagaaagcctccctaactaggtgcagggatagccaatcttttggcttccctgggccacaatggaagaagaattgtcttggaccacacataaaatacactaacactaacgatagctgatgaatttttaaaaaaaatctaaaaaaaaaaaaaaatctcataatgttttaagaaagtttacgaatttgtgttgggttgtattcaaaaccgccctgggccgcatgcaggaccacagattggacaagcttgacgtagggcatcttggttgtgcagctgcggcccaccttttttttttttttttttttgagatggagtcttgctctgtcacccaagctggggtgcagtggcacaatctcgactcactgcaacctccgcctcccaggttcaagccattctcctgcctcagcctcccagggagctgggactacaggcatgcgccaccacgcccagctaatttttttttttttttgagacggagtcttgctctgtcgcccaggctggagtgcagtggcacaatctccactcactgcaagctccgcctcctgggttcacaccattctcctgcctcagcctcccaggtagctgggactgcaggtgcccgccaccaggcccagctaatttttttgtatttttagtagagacagggtttcactgtgttagccaggatggtctccatctcctgacctcgtgagccgcccgcctcggcctcccgaagtgctgggattacaggcgtgagccaccgcgcccggcctttatttgcatttttagtagagatgggatttcaccatgctggccaggctggtcttgaactcctgacctcaagtgatcctcctgccttggcctcccaaagtgctgggattacagacgtgagccaccacgcctggcctgcagcccaccttttatgtgcactgcaccatctgcatggggacagcagtgaagctgtccccctcctgaagctactaggggaggatgtggggggaggaggcagtccagtttctaacatactagactctgagctggggacgaggctgggctgttggagcagcaattaccttatctgctctaagtccgtggagctgtggacacccaaggctatttttatccaaacaagatgaaatttattatttgccaaaattctgctcaatatggtgccttttacagccaaggatatttgctaatgagtttttaataaggcctatgttctataagattaattacataatgtttgggaaaatgtctagaaaaattagtctgagaggaaaggccccaagcaatgatctccttccctcatctcacagggtggggttgtcagttatctcatattggtggaaatttcccatatttcaatgccttgttccatttacaataatgtggatgaaaaatggcctcaatattggagcccagttcagttgtcccctgattattattactccagtgcttcatagtcctccagctaaatttcagtaaacctgtcctaaggggatttacccacatgaaaaggataggaggtgaattacagctggttctcctctataaaccaatatagaggagccgaggcacagataatccccaaagagtggataatccatttggtttgacaagtctttctgtttgacaaagacttaccttttttgattacgttttgtctgagctatttagatttgtattcaggcaaagcagacctgtgcatgtgctatgcctaggtggtgcaaaaattactctatttagtattttgtgatttgtttttcatacttaagtcatatggatcagggagaaaaaaactatcatgattttcttcattctcctgtctgtataggatatagcaataattttgattgttgacaataaaatgtgattcactattcctctgaattcttagcatttaatactgctctcctgaaccagacaaccaaccatcttgcagtaaagtaaaatatatgaaaaaagggagctgtgcttattcagtatgattgtttaatctctctttttagaagcctgtcagttagtgatgtttaccttgaataattaaatgacaaatggtattcattttaaaatatatcatgtccagaatctttaccaaaaaaaagcatagctattgttatcccccattgacctataccattgaggctttgttatttaaaagatagcatttacattctaaaaccacagaatttcccaaagagatgacaatctaaaccctgctattaatggagatgtagatattgaaatcattctcttattcacatttgctgtttcaaacatgagcatctggcccagcttctatatttaaaatacaaatacattaaggcacttttcaaatacccacaaaatacagtgcaattctgatcttacaaatcgatgcttgtaaatttgatatagtctctaaaacagactcggtgctaaatggcatgcttatctacattagacatttgagttaaaaatacaaattatgcagtgactgcagaagacgtgatgtgtaaaatggttgaattgctttcagcaccattttctgtaagtactggaattcgttcatgctttgcatttcatggtaggagagaggaaaaaacagcaatcaccaatcctctgaggatagtgattatgaaagagccctttgtgtgtgccctggagatggaattcttttccattagttgaaataagcttataccagacctggcagtggtcatcaagataaaatgcccccttttacataggtgaacactttcagagtatttagagaacacactggagctctgcccagtcaacttagaaacagtctttatactcctcgagagccgtggagctttaaaataaatagttgcatacaaagaaagtaggacagcagttagtaaaacacctactattaaaccacatgtgatgactaggccagaattaattgttaaagagattttccacctttaaggaagttagacgttttgtttgtttgtttgttttttgtttttgttttccagagagagaagggaatgttcatggctaggtcacaaaaaaaccttctgaaaggcaaaaattccttcccaatgggtctgaatatgggtctgaatattcctccactatctttgtcctggattttaaacccacagcctttcttagcagggacaggccttagagatcgtccagttccattttttcccttcaggacgagtacactgaggccaaaaggtgacgtgccttccccacggtcgcgccactgcttagtgggagatgagccgagaacggcctttctcggaccgtccactacattctcccctactctacgcttcaatcttctcccgtgaaaccttcacttgcttttctacaacgttgacctaaggcggaaagccgcgtgccagagtgggatgggagaggggagctcacgctgggcccgaggggcccgccggcagccgcgcgcccctcgccggcccgcgctcgggctccccctaggggcaccatgggcgacacgggggtccccgcgcgccgccctctggacttacgtgactgtcgctccccttccagaagtagaaggccccgatggccccaaagagcagcagcacagctcccgaaatgaggaccacggctcccaccttgagcagccgcgcggggctggagggcttcaccgtcagcgtagcgtacgcctgcgggccggggcgggagagggaccgtcgcgtttgtgccgccagcacctgcggcccccagcgcacccgggccccacgcggtagcccccagggagtggggagtcgggcgggaaacagctcgcccgggctcctacgggtgcccctttcgccgcgctccctcccgagggtcctttgcagtcgggcgtggaagtgggatgagcaaaccccgcagcacagggccttcgccccaggacctgcaccctctaccggccacgggacgtccctccgcacccgcctgtggatgccgtgacccctgcacactcatacgcgtggggcgacatcccacccacacatttgggacccaaatttatccccccgccaacacacccattcggtggcacgcacccctgagtccgaactgtggaacctgatactcacacaacccaggccctgcgtgtggaatccctggcggtactcaccggggggctgcagaattccacgtcatcaggtcccaccagggcaatgggaactttgtcggagttctctgtcatgtttgcggcgggaggagtgaggcacttggagactccctgggcaccctgggatctgtcccgctgccccgacgtgcagggcatttcaacgccgcgcgcacacacggtgcacggtcccgcctgggccagcccagcggtccccaccccttccagcgcctcacctctctcctcccttctctctcccgccgcgggaagctcgtcctgcactcccggatgccccctttcctcctcactctatcctgtctactggccccccaaacagcatcccggtgactctgaatgtgtgggggtggttgcatccctcagagcgggatgctgaatcctgggacccaaagaaatactcaagtgccagagcaattagccatgcaccggaggatgtcttagaatgtcagcgggctctgctgtgacaactggctggaggccatttcctgcagggtctttgtaggtgtgtgttggggtgggggtggggggaagatggctcatggaaggtgaaggagaagacaacagagtggtgcaggtggacaggggacactggcctaagagtgtaagggttaggccaccttctcactggcctggcattgctggatggcccctgggactggaaaacagagcagggtcttagggatggctccttgccaccagtttttctagggtctgggtacaactgcagcaaaagtgagagctaagcagagcagggctggagggaaggagttggggagaccagaataaaagtgcatgctggttggttgaataaattaaataagtgcaaacaaaagcaacaatggcaaagcacacacacacacacacacacacacacagagtactgatgtatccaaaggaataacacaaatgtgtgtgtgtgtgtgtgtgtgtgtgtgtatgtatgtatgtatataaaattttcacttttggaaatgccatcttccagttccaggatacatggtacttcatttggatccaggcttccttaaattgcgttcgattctagctttgtgcagagctctctggtgaggtgtaagtgaggagcactagtgcatgagagggattgaggcttccccaaagggcagcgggagattgcatgtgcaggactgcagaaggagaaagtgttgaagaatcatccaagacatgtgatgaagaatgaggtgacaagcatgatgacctggggctgggaaggaggggagaagtggaggagaccactttcacagaagaatcgataggacttggcaattcctgggctgtgggaactgagttttcagacctaggaggattgggagagtgataggaaccctagggaagtgaaaaaattggaagaaacagttttagacatgttgagcttgatgtggggatgaaaagtaaaagagccaaggaaatgtcctgagcctgcattggaatcagctatggaaacagctgtctgcacatcacactagacttaaggtgcttggaaaaaactccagcaagatctccagccagggctcatccctggggcactgctgaggcagagttcaaagacctcttttcacaagggcattcttcacaggaattttggtgaaggaataagagaagtaactgtcagagaggtgggagatggtacaatataaagtagtacatgtaatt

SEQ ID NO: 113 - DNA, 13995 bp, Homo sapiens
  source 1..13995: mol_type = genomic DNA
caggagaaacaggcaggaagctactagaagctggcagaagagagtcaagagaaatttataggaggccttcgggagaattagagcaaagactctcaggagaattcagcagacaggaaccagaagaactaaagaaactttcagaagtgggcagaagagagccagaagaactgggaaaaacacaatttggagaaataggagaaacgaaaaaaacaggaaatgagatggaaaaggaatatgaatgaagccatcggtagagatgaggatcaggaagctggtgttcagagggatcatgggattttattaaactggattttcaagcgatttgtctgttataggaaaaatgagggttttacttctgctgctttccatcactattttgccattaaataggtgtctttcactcttgcaaaccctgagtctgtcactttgcctcttcacccctgcccattcttggaagagcatcgtggaagaaatgagaaaggtgccaagaagaaagggtttcaggagggtgaagatacgggcgctacagggaacaagaagtcacagggaggagaggggaaggcctgggaggagaggtgcttcccacacaccggtgactgactgagtccctccagtgcgcaggacagcggggaggctttatggatggaacagtggtggggcggccccagctgtcacaggtaggagaatgccgcaagccagaaccaagcgaatgctgggagtgaggccaaagataggggagtggcctgggagtcgggagggcagacagactccgcctctgacacctctgggtggcataatcaggtaaatcaggctctccaagctggcttctcctctgaacaatgggatacctgcctcaggggttgctgcgaggactgagtgcttagcacagcacttggacaggaaactcaaaaatccaacggagctctcagtggtttcacagaggaggtggcagctgaggatctggcctcagaggatgttaggatttcactccgttactcatctgtccctttggccattgccatcctggtctgtctccacagctcctagaaggaaaggtcggggctgagactgactttcggctggcacagggcctggacgaatgaggccagtgaggcatttcagatgcagagtttaccggaatgccagcaaattgcatgataatattttaatccaatgtggtaaaaaaaaaagtttttaattaatgcaaaagtccatgatgaataaaatatcaaaaattaaagacaggatccgactttgcacgaccctgcctcactcacttcctgctaatccacgggaccggggagggtgactgagttacccctcaacacgcagaaaaagctagtggccgctcagctcgcaggcgcagtgggtgggtgcgcgtggggagcaggcgcgcgcagggggcgggaccgggccgaggttcccgcgcgcggcgagagtttcgggttttggttcgcagcgcctgcgcgcagaggagacggcccgcccccagcccgcccgggtgcccgctccgccccccgggctatgtaaagcggccgggctcgggtcgtgccaccgctggactcccgtgtccctccgcgcaggcgggcggccccggagcgctggtgccggcagaggcggcgacggtggcgcccctcctcatcatggtgagaggccgggcggggccgggcacggggtagcaccagggcgggaaacgagtgtcggggcccctcgggaggaagcgtcttgcaaacgaggacccggggctccgggttcgacttccagttttcttggtactcagggcggccctgaggtctgggagaagcggaggggttttggggtgccggagaggccgctgtaaagggaaacggtggtgtttctcaggagggaactcgggaccgcagaagctgctgcgcctctgggagcctgggtgggcctgggccgggagcccgggagctgctcccgaccccacgcaggcccgcgctggggcagccgcttcggcgccccctccccgggcccagtctcatcacgcggaaccgctgccccgcgcccgggtgcgggcgggaggtggagccagttcagaggaggggaccctttacggtaaaagctgccgtcccttgtggcttctagaagataggaaaacaagtggctccgagaggcgcttctgacacacagcacagcggcgggtagagctggatcctaattgcaggtgccctgtgctgccctgttctggacaggcacaaagaccacgactttgtgggggccgggagagggtagaggaggaggtggcaggcttggtgaaagagggcctttgtccagtgctctcctgccctgccccccaccagcccttctgtgggaccattgtacccgcatgccagacaagagagtattatctgttgcggccattgttgggggaagggaggcagtcttggggtaacccttctccactcccccccttctctgtgcactcagccgtggcagctgtggcttggcccagacacagagacccccacctccaaagaggacgtccttagtaggtgccaagcatataagagtgaggccagtcccagaaccgcaggctcctggcgcgccccgcatgcctccagcacgtttacctttccgaagtggcaggaatggggaaagcgcacgcttaggagagcttcagacaagcttccctcttcctcctccacgaccagaagcggaaaggtgctcccggaccgaaagggaaagaaggtccagcactgccccgcttgggaaggcacccacaaccagtctagggactaggggtaaggccggcggggagcccgcgaatgacctgggctgacatctcttcccctccttacacagaacagaggcttctcccgaaaaagccacacattcctgcccaagatcttcttccgcaagatgtcatcctcaggggccaaggacaagcctgagctgcagtttcccttccttcaggatgaggacacagtggccacgctgctagagtgcaagacgctcttcatcttgcgcggcctgccaggaagcggcaagtccacgctggcacgggtcatcgtggacaagtaccgtgatggcaccaagatggtgtcggctgacgcttacaagatcacccccggcgctcgaggagccttctccgaggagtacaagcggctcgatgaggacctggctgcctactgccgccgccgggacatcagaattcttgtgcttgatgacaccaaccacgaacgggaacggctggagcagctctttgaaatggccgaccagtaccagtaccaggtggtgctggtggagcccaagacggcgtggcggctggactgtgcccagctcaaggagaagaaccagtggcagctgtcggctgatgacctgaagaagctgaagcctgggctggagaaggacttcctgccgctctacttcggctggttcctgaccaagaagagctctgagaccctccgcaaagccggccaggtcttcctggaagagctggggaaccacaaggccttcaagaaggagctgcgacaatgtaggtggcaggttggggccttataagcccaccttgctgggcacagggtgctgcgggcaaaggaccatcattgtactcaaaggatggagcacgaagcagcaggaggcagagagaggctcacctcagcgggggcaggggcaagcggtgcgtcccagtggtagccttggggagttggcagcacattgggaacacgggggcttcccagagcgcctttcctcccaccacacctatccttctagccctcttctctccgacacccttttcccagcctgaatgtagaccactgtcccttgtcttggaggtgggaaaaacaaattactgtagtaacaggaaacatgtcctcttctaatgtaaccttagagggggaatcaagcccagtgttttccaacgcatttttagcagcagaatcatgttccaaaaaataataataataatcacatgaaattgtaagctgcaaaaaaattaaaactaggactattgtggcttcactggggatggttctcaggcctcggactgctcaatttactcatgggtttgtggcatctgcagctccagaggacacaagtctcacacttaggccaaaacccgttttcagatggaaaaacatggacccaggagggatgtggggtttacgggctggaaccctggactctggccactctagcagggttctctcttggcatgggctttttgctccaatgataggtttgagataaagaagggtcctggtggctctcctggagtgacctgttggagaagtgccacccactaatccatctatatgcctttaggccatttctggttgcctccaattttatttatttatttattgtgacacggagtctccctctgttgcccaggctggagtgcagtggcgctatctcagctcagtgcaacctctgcctcccagattcaagcaattctcctgcctcagcctctcgagtagctaggactacaggtgtgcaccaccacgtccagctaatttttgtatttttagtagagacggagtttcacaatgttggccaggctggtattgaactcctgacctcaggtgatccgcttgccttggcctcccaaagtgctgggattacaggcgtgagccaccaccgcacccagccacccccaattttagatgatcttcatgcctgaaatagccccactctggtttgttgacattgtgtatattgcacagaagcagggaatttgtgcctgtatgggttctcagagagcttttttctcagctcctaaacttgaactctgcagtgaactgtggtgcttgcagtgacattggccaggagcaagccctgtacctgtgagctggtggctctgccctggagtgactactgctcaaagttgcttttaatatttatttatgagacggagtcttgctctgttgcccaggctggagtgcagtggcatgatctcggctcactgcaacctccgcctcctgggttcaagccaattctctgcctcagcttcccaagtagctgggaatacaggcgcctgccaccatgcccggctaatttttttttatttttgtatttttagtagagacagggtttcaccatcttgaccaggctggtcggtagcacaaaagaaaggaggggcccttggcccaagatgggacgaatcaagcttgacaggatgattgccagatcttttttttttttttttttgagacgggggtcttgctctgtcgcccaggctggagtgcagtggggcaattcggcttactgcaacctccatctcccgggttcaagcaattctcctgcctcagccacccaagtagctgggattacaggcacccgccaccatacctggctaatttataaatttttagtagagacagggtttcaccatgttggccaggctggtctcaaacgccccgcctcaatttcccaaattgccgggattacaggtgcgagccactatgcccagcctattttatttgtaaaggaaaactggatttttctgcccaggattagagcaggagaaatgtaatgggccagcaaggctgctctcaggagaggccttcctcccctgtggagggcgagacatcctcatggggactcaattcagaacataacaggaaaaagcgagtgactccaaagacagccacaggtgtggagtctggaaatcaaaatcacagatactccactcctctttgtgtcttccagccccataatgtcaccccattatagtccaagacccttcctgtaccaggaggcccccccataggcctgcaaggtgtgtattaaactgatggtgacgttgtgactgcttgtccagatgggcccctgagtgaaatggggcactactgatagttccctggtggtcctgggaacactggggtatatggtcaccctaactgttgtgctggattgatagatagggttggtcacttgcccgaggccgatggctggtacatggcagagctgagatattcactgtgttctggctgtttccaccgtaccatgttgttcccagccctctgttttctttccaccccacttcccatgacttgcttcccctttgagacgtggtgctagtaaatcttagattcccttggcctgtactgcctgcctctgttacaaatgccttagagtttggagaagagatggaaagatctatacaatgtaaagccagagaattttaacttttttttttttttttttggagacggagtcttgctctgttgcctaggctggagtgcagtggcactatctcggctcgctgtatcctctgcctcctgggttcaagcaattctctacctcagcctcccaagtagctgggattacaggcgcccgccaccacgcctggctaatttctttgtatttttagtagagacggggtttcaccatcttggccaggctggtcttgaattcctgaccttgtgatccacccacctcggcctcccagagtgctgggattacaggtgtgaaccaccgcacctggcctgagaattttaactttttattgctctaaagttgccattagtttgaccaactaaccaatgaatgagctgtagtgggttgctggagaggtgatgcttagtgtccgagtgttttgcgctgggcctcggtggtcctggtggcggatgttggtatgcccctgctcccctgccctgactgcacccgttttctcccggcagtcgtccctggggatgagcccagggagaagatggacttggtcacctactttggaaagagacccccaggcgtgctgcattgcacaaccaagttttgtgactacgggaaggctcccggggcagaggagtacgctcaacaagatgtgagtcttccccagggacacatgggggaggtgggaggttgggggagaaggggctgcagcatcttctgaagataggtaccggtgccaggcagggaccaaaaaccagatggcagctcaagaaaaatggcatctcctcctcctagctcccctgtccccaggcgtagctgcatagacctcagccgcaggttctaaggagcctgccctggcagtactgccagcctgtgcattcacctgcccccaagcaccttcgccttctgcagattcatggagaatgctggtccacagtgggctcctgctctggtctctctgagcctgttttaccttccaaagactaggagtccttcgcccccagggagcctggtgcactgaggtccccatccctgtccccaggtctgaggtctggcctggccccagagtgagggagtttcatacgataatgaagcttattggctaatgggtacgagacctttctgcaccacacagctggcaccttacacccacagccactgacagtgatccctgaatgccaggcatgtcacccatatccacagtctccaacttccaagtgtccacccccaagcccactctcccacttctctgcctaggttagcacaatcgtttgtttgttcactagagtgtcctcccaaatggaagctcccctgagggcgagtttttaagtttcgttgactcctgtggttccagcaccctagcatagtggaatgaatatgtaacacctgagctaccatccctaaccatgccttcatttagcatttattaactacccatttcatgccagacactgttgggacaagggatcgtgagcaaaaatagaaaagcgtttatgctgagatgggatgggctgtctcaaagaatcagatagaagcagacatatcatcagatgggaaccaaagtgtaagagcaggtttccatcaagggcgagtctgacctcagtctgacctcaccctgtcctccagggcgctgtctgggtcccaggggaagctgagcggtgccaacagtagcagctgttgtgtgcgcggacacccctgtgggctgtttacctagtcactctcataaccacattaactctgaggtaggctctggttctccctgttttacgggtgatgaagccaaggcaccgagaggtcagccagcccgctgaggccggaagccagtgtgcagggagctgggctccctcaggaagtccggctgtccccgtgtggccctgtctgagcgccttcgtgtttctcacttgagcctggagcgcctatggaaggtgcgtgccgcagttgttagtggatgctgggcctataccgacccctgctcagctgtgctcacttctgttagacttccccttctctcctccaggagggaccctccctgggtcagctgttcctcaagagcctgccatctctagcttgggcccctctttctcactctccccaggtgttaaagaaatcttactccaaggccttcacgctgaccatctctgccctctttgtgacacccaagacgactggggcccgggtggagttaagcgagcagcaactgcagttgtggccgagtgatgtggacaagctgtcacccactgacaacctgccgcgggggagccgcgcccacatcaccctcggctgtgcagctgacgtagaggccgtgcagacgggccttgacctcttagagattctgcggcaggagaaggggggcagccgaggcgaggaggtgggcgagctaagccggggcaagctctattccttgggcaatgggcgctggatgctgaccctggccaagaacatggaggtcagggccatcttcacggggtactacgggaaaggcaaacctgtgcccacgcaaggtagccggaaggggggcgccttgcagtcctgcaccatcatatgagtgttctcaccaccacttatgcccctagaagggaaggggagagggaaacgtgccctctgtttgatccttgttttgtgacattttttttttttttttttttactcaaagttaacctacctgtaactttttaaaaacttgtaaaataactgaccctcccttcctgtccgccctcttcccctctaatgctcacgctcccaacacaaggtgggcagggaggcaccattcaggaacctggaccaaagctgacgaggctgggccaagccagggatggggccacagccagaaccccgagccctacttccaggttctggttagctcagccccagcccagcccagctgctctgcccagagctgggtgagtggggagacacctcagagccccgcaaaacccactgaccggaggcaaaaggcagtggggctgggggtagttttccatggtcacagagaactagtggtggctctgagaaggggaggacctctgggctttgattccatctccttgtcttttttctttgtttttagagacagggtcctgctatttcccaagctggagtgcagtggtgcgatcatggctcactgcagcctcgaactcctgggctcaagcaatcctcctgagtgatcccatttcttaatcagtgtagccccaagaaggctggggctatttaccagggtagaaaaaggagcttacctcccacctttggtcctaagtccctgccccctccccttcacaccataactaggtaacagtttgataactagggaagaaagcagaacagttaagcagccgccacatccccgctggctgggggcctcactccaggaaggggctggactggctgtcctttccagtggcctggctccgctgtgtggatggggagatcggggccagaggcagaaccctggtgaggaagctccagtcctgctctctacccagcccatcttgcctccatggtgcctctggaggcctctgggcctcctctaacaggggctggtgggcaccaagagccaatggagtagacccctggctggtaagggccaagtcccaccggttgcttctgggaaggggtttctaacactagtctgtgtgctgtggttcctggggtgccctccactgccctctgttcagtaacagggccttgctaatcgggttgtcactcaacaaaagtgctttggatttaagttactatcctggctttgcccaacctcagcaacctgtaagactgataatgaaataaatcatgttaatcctagctgtgtgcagtctctcttacccttctgtgcccagctcagtcttccctagggctgggtgtattaggactggctttgtcccacagcttggggccatcggtcctgtctcccctctgctggccgggcacagctgtggtgaggttgggcagctgaacagtgttggctttcatgaggaggcagaaagcagaggctggcctcagactcatacagaaggtgggggttggctgggtacgagggatgtggagcacaaaagcctctcatcccccattaaccagggcaccaagcccacaggtgtccccagcccactggatcagaaagagttcagtaagaccggaagctcctggtatgggtttctcccagttctctagggaaggccacctgcaggtcactgaaacttcaagcaccagggaagatctaacatttgagtcccttccaggccatcagaggcctagtcagccacatgggaaacttccaagacctgactcaggcatcattccaccatggctaaggcaccagccggggaagacttgaaagaaaggggcaggagctcagatgaagagaaatcctaagttacctttctaggtcaaggcctgtccctggccatctctgaacttcagctagagcttcaagtctgtgcctggagctcctgggaaggctactcaccttgaacaccacgcttgacaggacagcatggtgcatgccgctgcatccgtgagcagtgtgtctcctgcatgcagaaagggagcagagaaggccaggggcttttgctaaaaatagtggccagaccagagctctggagccacctgtcccacctcaaatgggtctgggggtcaggaggcagggttttatctctgtctaccatctccctcgaacccacactgcaacaggaactgtgagagtctttgtaagtaaactgccctgtctaggtcagtacccacctgagctttggacgcacacagcttttagtacccacctgagctttggacacacacagcttctagtgatttctggggccccaccgtaaagtgagcatgctttctgaactcgcttctctgtgactgatgttaggctgggcccagaggcacagccggggcctgcctagcactcacatgctggacaggtctgggagaggcagagtgccccacctgccactaggctgggtgcccacagcccgcatgcagcagcttgctgcaccccaagtccaggtcgggctcagctctggctcacagactggagacaatgcagatgccagagcaaagggccaggaagggtcaaaacattttattctcttttttttttcttttttaataaagttaaacagtaaaacaaaaattcacaagctgcctccctgtccacccccgcctccctcccctgccctcggtcttcggcattggttccctttgctccaccccactcacagagacacagggcatccaactgagaaaacgaaactgctctaagcacacggagacgtgatgaagggaggaggtgaactgtttccacattcaagattaaactgagtgaatctgcattttctgggttctgggtggttgcccttcattagccaaattgaaaaaagaaattccctggaccagatgctgaaagagaaaagaggggttggtagttggctatggattttctaaggaagatcactttgctctgattatggaaaagtcttcaagggctgcttcaaactcaaacacagagagaaactctatgggtatcaaacagctcaggctgtttttgggtgcaagagggagcacgtgactgtattatacatgggtagcttctgacctcagcattatctatatagtacctttgctcttgcagagaagccttggtactaggcagttagagatgcctccctgaccctgcagagatgcggtggctaaaggtcccaaggcaaggggtgcctgggaaccttcctgtcttcatccttagcaacagccgagtggatagatgccctgctagatgagaattcagctgcccccgctcatgggcccctctgactcccaaagagctgcctaagaggcaatgagtgtgttggcttgtgatctgggaactcccaagaacagcaggcccacctaccttcaaagctgaagccgccaggaccgccaaagaatgccttgaagatattgtttggatcaaaatctgtagagcagggcaagtaacatggaagggaagaaaaggtgaaaaattagaaatgttcgaagagaactgatgacactgagaacagatctccaaagctttcctggagagtctcactcccctcctttcccaacacttcagactgcaagtgagcaaacctgccccatcccgtgcaaaacatgctacctgatcccactcctaggacatgttcccttctccttccaactgctgccccaaaggaagctttctctgcttcagcttgcttcattgggctgttttctcaacaaatggaatgccatttgcacttacacaagactttccccatactctgtctccctataatgctggagcggctactaaaaaggataaaatgtatcacttaaatgttaccaaaaataaatataagagcaagatctaggatttactgtatttgattccatgtcttttactccgtagactctaggctagaaaaaaagctatggtttattagctgggcgtggtggctcacacctataatcccagtgctttgggagtctaaggtgggaggatcacttgagcccaggagttcaaggctgcagtaagctatgatcacaacactgcaccccagcctgggtgacagcaagaccctgtcttaataacaacaacaaaccaacaaaaacacctactaggtgcaaagtactaggtactttgcatacattacattacttaatcctagtaatgttttgtcagggtaagtatcattcccaattaatactcaacaaaacatatgtaggtggttcaagtaacttgcccacgatcacatggcagcgaaagcagcagaactggaaaatccaactcctgcctgactggctctgtgcacttttgcaaggccacagcatgtctggtggccccatccctgactgactgcccaagcttcacagaaggactgacccccaccaggtgatcccacagccacctcgtgcccagagtgagtttctctgcttgcatctgtgtgtcttcctgggctcctggcttagtgaatgaccccgagtcagctatgcctgtcactttccccaacacatctgaatagcaaccaactcctgctgagtctaccactaactaactccctgactgtgccctccaatcctttcctaccttttgtgtcttccttccatctccattctccttactccctccaaccccaacctcctcacccctatcacaaatatatttccagagccaaaatctggtccacagtgcccctacttaaaacttcacggctggccgtggtggctcaggcctgtaatcccagcactttgggaggccaaggtgggtggatcacgaggtcaggagatcgagatcatcctggctaacaaagtgaaaccccgtctctactaaaaaaaataaaaataaaaataaaataaaataaaattagccgggcgtggtggcaggtgcctgtagtcccagctacttgggaggctaaggcaggagaatggcgtgaacccgggaggcggagcttgcagtgagcagagatcgcgccactgcactccagcctgggcgacagagtgagactccgtctcaaaacaaaacaaaacctcttcactagtttttgactgcttatagatcttcttaactgctaggcagaggaacatgtttattgtggtgaacctaggtttattaaacacaaatacccccacactgaactggagaggactcagcattatctatatagtaccatcattcttattttaaattccggctgggtgcggtggctcacgcctgtcatcccaacactttgggaggccaagatgggcggatcacacaaagtcaggagtttgagaccagcctggccaacatggtgaaaccccgtctctactaaaaatataaaaattagccgggtgtggctgcaggtgcctgtaatcccagctactcaggag

SEQ ID NO: 114 - DNA, 35586 bp, Homo sapiens
  source 1..35586: mol_type = genomic DNA
ggggcagatcgtgaaaagtggactacaaagagcagagcctctctcctcagcaaacatacatttaggggaaggggcaagaagttaaactttgcgtgagagcagtatcagttactgttatctttccctaggtcatttaagggcagtacagttttacaacttccataattctatttcatttattgtatttgatctttttatccacttggtttcttgctctaaaagcaactaatctgaggaatttaagaaatgtataaaggggaattaaattatagctagggaatcataataacacacttgtatgtcacaggtgcattcatattgtgatggtttagtatcattgttaattgcatcttggtatcaaactatacaatatcctcttgcgtgagcttcagcacatttaacattagctcacaaatttgtaccaagttttaaaacagaccacaaaatcacatctaagaatgacttttctcatattccatgacaatctgaattttaagcttgatatatagtttatcatttttatttagatatagtgattacgtatgtgaataaatatcaacctaagccaagaaacagatataaaagcacagccagctatcgactctatttttttagggttgtcttagtaaataaagtattgatctttcccgtttgggacttcagcacaatcccgctctccactcctcagtaaaatggattcattgtccttggcttgttcttagcaaatagtaatccacatcacaaaaaataaactggccatctcagccaatttggtctttttttttttttttttttttttttttatgagaacaggttcacgtgtcttcatggagacccaaaccaaccatctcataaaagaacaatttgaaaccatgcagcctcaaacaagtcttctctcctcattattttaataagcattacacaccccaccccgtgtttttccagggatttttttttggacatagaattaggcagcttttcatcaactctgagaaacgttctctcaccctataatgttgccttgtttcttttattttgtttttgtttttgtttcctccccatgacttgttttattttggttttggtcaataaatgtgacttacaaggcaccaaggtggctaggaggatgctaaagtgagtagctactctatctcattgttcattagcaaaagcagcacaacctaacagtggcccacagggaaacctaagacttcctgaagccagaagaaatccagtggtttaggtgttatcactcaaatacaggttgaatcagtaactttgtaagctacgaatatttacatgagtttggcaagtttgatctggaaaaaattctggaaagaaaaaatacacaagtcatgagatattaaaaatttgcaagatacaagactatttttaatgggaaatccaagaaaaaaacctgaaatgccatatttatcacaaccttagatagtcactgtaagtcaaggttcctcgccctctccattcaaagcaaagcatcactgtccatgaaaggcacccctcagtgacaggaggtgcacctccccacgtccgtttagttacaaacaggagcccacattttcttaatttctataattagtgttagcattgcctacatttgagaatgtttgatgatgatcaaagagagtatggaaacagatttggcaacacttctacggttacgaccgtgaacagttttcactgaagcttacttagtgtcacaggtcccgccatgttcctgtgaaggtcactaggttttcaggaataattgtcctgtttagtgcatttcccaagaaaatccaagttaggagaatgttcctgatttactactttaaatgccaaattaaccttaactagatacgtttaaataaagctatagggactatgttttaaataacaattgtcctaccctactggaaaatagtgttaattattattcagttctatttccatcgtgtgtcagctcgggtgcgagttcgctgggttatgtaggagccatcagacttaagcagccacagacaagacaaaaaagaagcacccaagtaattaagtgacattaactcactaacttttaatcagagtttaggtggggagggggcatggaaagcccttccccttagctttggtaaattttcctaaatttaagaattgtttcctgctgaagagtcaggagaatgatttaaacacataatgtgctttttaagcaactaagtaacaatatggcaaagagttttgggtcgggggggttgggggggggatttgtagcatcctacccacttgattgtcaccaaagacaatgagaatctctttttagaaactggtgtagaccataccctgacatttttaatcattaaagtcagattccattgaatgcaaatgtaacagagataaagaaatttccgggagtgattgttactagactttgtatattaagtgtggccaaaagataatttcccaccaggtcccaactctttttccattcctgtagaagaatggtagattatttagtagtaaactcaacacactaaatgtgagccaaaaaaaaaacgtttagaagaaaaacaaacaagccagaagagtttggagcgaaacaaaacgcaatcactagtgtcatcttttaacacctgatgcaataataaatcaactttctaagccacttaaactcagaatggtgtttgagaggccaatataattattgtttactataaattaaagcattcattagtttttacacattccactaaattttagagatgggtttttaaacttgtggtttctaaaaattttaatttcattcctgataaaaagtgggtttctttcactaatagccatatctcacccagaaggccacattttgaatttgttgccatgtatttccttaaatttataggcaatcaagtatttgaggattcaaatccagttcttatcagacagccactgcgcttgcatatgtgcacatacactgttataaaataagcagcatacattatgaaatccctattttgtttatgaaatgtcttcgcttttttcctcaatacagaattaaatcctctattgtcaagcttgatttatcaaaatctgcaaaggttaatttaagtttcatgtactcctcagcttcacctataaaaaaacgcagggtttgtcatgatgtcaaccaacagattttcaaaatgaatcataaacggagacaaacacggtataaacaagagacaaaatttttcttatcatgaaagacaacatgcaaacataaaatgcagacattgacctttgggtgtgactttactcctctctacgaccagcagaacggcactcctagagctcagtatgattagcagaagtttcacacagatctggaaaaaaaaaaaaaagtagatagcatcattatcactttagactccagcccgttaagtcatttacattatgcaaaaactatgttctggtagaagcatattttaaaaacttttattatggaaattttcccaaaatgttattatagaaattacccaaaagcagaaagaagggtgtaatctattcccctgcaccccaaacccagcttcaacaaagatcaacactgctgttcttgcccatattccagtcttttttggctttaggatttaaagcaaggccaaggtattgtgtcatttcacccatggctccactcagagatatttcacagcctgtaatgggcacaggacatctggcatttaacccaaggaccacagaagcaactagatactttgataatgctacttttccagttggaagcaattaatgcaaactctatcgaaaaaggctatggattactttagctacataacttttaaaaaatatgctagcctttgaaagcaattattttacatattagaatttaacattcccattagttttgagaagtctacataaaaagggaaaaatcttttactttaaatgtaggctgaacatttctagatacttgatctcatcttcatacgctgcatttgaaattgtgatgtggcaaattcatcagtgatgatgcttttaaatgttaaggtttgatgtggaagcagaagagatacatacagaatatatttgtgtatttatttatgccttcatatattctatttaacaaatacttccatgagtattagaagatccattcatttctaagttacagtgctctgttccataccttgagtggcacagagctgcacttttcatcacgaccctatagcacattaagattttaatcattttgactccaagacatcaaaatgacattctggagaagtctgaactatatgccccaagatattccaccaggaacatctaatgaacttgcctttatgtcttgcctaggaaaaaaagagattatctgaggaataaccccctgttactctgtctcacactccaaaaacagagtacatttgatgacttttattctatccagtatataaactgcagtggcagccacagattcatttgtaatcctataacctttcatggatattttttttcactcatcaaaaaaatgacacataatgtttatgaaagtctcagtgatgtgttatattttcatccaaacacaatcatcttaaatctgacatatatattttctccattcttccccacttatttttgtgtattggtgaatgttagaacttcaatattttgaagagtctgtgaatgtgccctacttgccagcatgtgattattataaataaagagaaataatctacattaagaagaaaaaaagcgaaactcatatataaacaaggtgtatgtaaagtgtagaaaggaactaaagtttcaataaaacctctaattctaccaatgtctattttctaaatatttatcttcctaaaagcagtgtgtgaatattttaacagcatagagcgttgcacgtagtatacactcagtaaagagttattgcttaatgtgcagtttcataccccccaacacacacacacacacacacacacacacacacacacacagtcacatctttaagacactgtttaaactctggagtgtctatcacagcaaagctgttgggcaagatcacaaggaaaagtatcgccttcacaaagcagagtatgactgtcatattctggttgtaaactggctgtccttgtatgttagattaggcaccagtgcatctggagtcttctacggtacgaacatctcacccttcagttgtctgaaaccatcccaatgtgttaagatgcatgaattctctgttgcttcagtcacttatcagagtttttatcattgatgtgttgcttgagctttttctagcaaaaattgttcagtttgaagaagctctcttccttgttatcgtgctattaactcacttcaacagtagggctttttgagtgggtgggagaagtccagtctctctctaggattaatttattctcggtttttaacttatgagtggtttagaacacccataaatatgtttcatgaagaaacattacctgaaaggactcaccccgcttcactacgtagcggctcaatggtggcttgcacctttgagtatcttttacaccttttacttccagtactgctgttcatagtggtaaggacttaatcagtgttttaaaaatcaaatgccaattaagaattatctcatcaggtttcattttatacttgcaaaattgcacctatcttaggtttattctttcagcttgcattttctcaaggttagtgttaagttttattccaattataaatatgcagaaggaatgaagaaaggtagttaagattattgaaattaagtcaaattgacaaacttgggagcagtctttccccaggatcttattattcggggtgactactgctgggactagttactggaaccctctctagtcctcctggagcatctgagagagggcccatgtagcagtggatctgcgtttgtcatagaccacgtcctttatgaggaaaaaatagggaaattaatatttcaaatattgttcatcacatttttgcttctatctgaatgcctacatacatctctgaattgtttgaaacactttaaaaacatttcctgtgggaagttgtggtcatggacatcacacatttctatagtatatctcccacatcaaagaaaaataccccaaatgcctgaataatcctgactacgtcgtctcactgtattcttttgcaagcttcattaaaactggattttaaacagaaacaacccaattatctactcagagtataagcaaaaaagacaaaaacaaaaccaaaaacaaaaaaaacaaaactttacctgttctgttaatgggagatttgtgtacttcttgtttaataacttttgatgacatgaatatttatctacaaatgttcagtagctgttattttaaggactttggcactacatttgatataatggatgtaggtgtattatatactttattgtaaacaactgctgaatgctaattgtctcaaacttccacattgtttaaaagtaccccactggctttaaatcattgtcttcatatctactcactcatttcttcccaaagatatccaaaagaatgcacaactgtgtactccattcttataaatgtattaaacaagcatccaagttaggggactagaaggtctacgtacagccaacagagcggagagtcagtgaccatcgctttcaactttgtatattataaataaaattctgctcattttttccagcttctgagtgtgtgtatatgcttaagaattaactattattttccaccctctgagccagaaaaaaattttttttaagaagtagatacaggaatggaacctggaaaaaaatccagcatccccccaaacaaacaaacaaacaaacaaacaaaaaaactttagaaagttcttacaaaataaaaatcgcaccttctgctgctgtagcagatactcaagccatgaagtgagggtctccttccctggtccaggatggaaaaatcctctctctcaaagtttttaaaaagaaagtgctttggagtcttctaattctgaacaagaattttctccttaactggaaatcaagaatgtttgaattcacttaatatatagaggaaagaaagtacaaagaggaaggccacacagccctgtggtttctgtttatctgttttctctcacatgctgtcgtttctgattcagcggagacgggggatcctgtgtcagagccgtggatcgcagaggcagcgaggctcggtctgcaaacaagacgctgcaaggctgagtgagagagagagggtgtgcgagcagcgagcacatgttacatcagacacagtacctgatttttcactgcacagcttgtcagctagatagtgtgtctcctgggcgataagtgaggatatttcatcttcatactcttctattatagtttcacactgtagaaacataataacaacatatgtggatagacgcacactggcggggcactttgttaggaaggactttgcaacaatttattagctaaacataggaaatcatgtaaccaaggtggtccatttttattcgcccttttggtttaatacatcattgcattggattaaccctcttcccagaatgttaattgcatcattttcctggggcttaagtaaatgatgagttgtgttggaagacatgggagcctgaggaaggaacatctctttgcatgtttcgcttccttaaatcggactggaagtcataggaagaaatggacctcctatcgaaggagctgaaaagtccaacggtttttaaactaaaaaaaaaaaaaaaaaaaaaaaaaaaagaagaccacagctccccgaaatgattaaaccagtttccttgtgatttaacataataatccattttgtggcttgaaagtgtgaaaacaattaagccttctcagcaatcaaaacaaacgcatcttcaatttcactgtggagaacacccttgacagttacttcgggaggtgtcttttcatgctgtttagagatccatccaacatttcacttcacttaaaaaaaaatacctgacctttcagagaagagggtgctcaaatacacccctgcatttgaaaatcttaaattctaactgaagtatgtttctttgttaaggaactaccaggttatactttcgggagctgtgaagttacctagtggtattcaccagagacttgtaaatcattttctgagttcattaagcaagactctaaaaatgtttaatggcattttaaaagatttaaattcgactctaatgtgcctatttaaaacctgtgaaatacaaacacacgtattcattgtcattcttattctgtagtacttttaaccctgattattgcctttactttctagttaaaataaaatctttaaaaatcggctaaagcccttatttcaaggtttcagcaggcctggtattttggccaatgtgtgaacttaatacattttttaaaacaggactgcccatcactttgtctgattcaacagcattgactaaagtgaaaaatattgcaacgtattttgccaagcatattctagcaagccagagactagcattcacaaaaaatcaacattacactggaaggaaatttggcatcaggctaactatcatacctaagcctttgtttaacttagtttgggctagaatattcgaattaactcaggatacaattctccctcctctgtcaagccttagaaaaaaagaggtggttgcatcactctccctctgtcatttggctgtagatatttgaaagcggcattcgttttaatttggcttttaacctagaaaccacagcccctgattccttatgtggaaacctgtgagagaccttccttgcaccagcactgactaagaccactctggagtccccacacgagcaaaatggtttaagcaaaacgttctgcaaaactgtcttaaagtccccgggacttgtgcacagcaccttccgtaaagtatcactgagacgtgtccattgatcaccataaattgccacaaccccttaggtgtctcaaaagtcaagttactaaacgcatggtgagcacttaagcagcaagacaacaaagtcagcagatgacattttaatgtgcattttgatgttccatgtcttgaaactcaaccacaacaagagtagaaaacaacaaaaaagagttccaaaaacacgtttctggatcatacgattcatctgcaaggaagagagcttaccgcaaatttcaaaggtctgtaagcatcagaataaaaatacaattttttaaattcttggtatattttgtctcctttcctaggagcgaatctcttgaaagttctctccttcgtcacagggtcttcctcaagcttgtagtcgttcattcgctcacagactttctccaaaagatccgttaggaacgcctccgactgagctagggggatctaagaagaaagacagggcgaggaaacttgtcttaatgttaatgttacttcaaagaccttccggcgagtccacatggaaacgccacactctccctgaatgcaaacgtgtgccacttccctagcacgggcccagaagacggtaccgcagattgttattacaatgtaacaacgacctgctttacatcattacggggctagcgtaaattccagttttttaaaagtgcatatatttcaaagtggccagaaaaaaaatacattcaaactagaaactatacctctacatagaatcatgtttagaaatcactgagcatgtagcaaaaagcatgacgcatagaaaatggcagttattatccatctacttgtcagacagagagaggagagagagaggagggggagagagacagagagagggaaaggagggagagacagagagagggagggagagagagcgagagagagagcgcgcgctcagctggcttcagatccccttagtcggggagaagttggggaggcccaaagtctggccctccccggggctgcccttggctgcgcgtcccccacgctgcagccgcgcgatggcccgggctggggtggacgtggggctgggagaggaaggggctcacggacgggcgccccatctcccaggcgggctcctcggctgctttctttgggaacagctggtgcacgtccccgcgcgcccctctccctccggaattcggcgaggattcagctggaccctttggccaccacctccgccccgggcgcgggtcaaagagcacccctcgcccttggtaacggagacaaaacgttcggggccgtctagacaggtcaaggtgcaggatgcggcgtccccgcggctccttccggaagggggcgtggagccgccaagggcgccggaccgcgccgcagcccgggcctttgcgggctttttccctctccaccctctgctgatcaaagtaggaagtttgcatgacaaccgcagtgaaaggggctgaatcacaaatgaactcgatttctgcagtgttgatctatccagcctccattgtcccctttcaggcgcagtatgaacccttccggtgccagcggccgcgctacattcacaggcgcgctcggggcgcacaaagggtctccgcgcttcaccgccatctggccacaaatctcatcagcggcgcggcggcgtccccttgaaagcgcgggcggagggtgcgcttgtgttcttgagacccaggttccattacaaaccacccagcatcgccaccggcgccccccgtttcaataaggaagccactttgtcaaaacattctaaaagaaacttgggaagaggacgcgtcagagaaataccgccgccgattaactatcagctgcgcctcccctgtgcacaggtaacatccctccttctcccccacgactcggctggagcttgattttgagctgctctcaaggcccaggcactcgaatcggaagttaaatagcttatggactatttaatagaatataccaccacacgtatctaatcactcaaataccacgcttttaaaactcatgaatgttttaatcgctaaaaatgtctacagtcaaaaactgcagcctaagtggctcaaagtgcacatttcaaacacaagtagcgttctacttacgctttaattatgccgttcattaattttcattaagttgtaaaacatgcaaagaatacgtagattaacaaacaaaactgaaaatctgttttattaatttacagaaacaaataattaaacacgtattaatcactggaaaaactataaaatgcagaggcagattttaaaatgtaatttaatcaagacagatcattagcggaaagattacggaggttttctttttctgtgatgcatgtattttaggtattatttccttagctgatacatatacaatatattcatagtagtttctggatgtcaacagagtagcattttacttgaaagtgaagagtagacgctgtcatttaaaaatatctaactgtaatcaagaaattcattctctctctcctttccttcctccctcccccactctcgtttcccatctgaaaagtaaacatacttgatacttggggggatggggacagagccaggaggaaccagggtctgatcgctgggggctttcagaaacttaggccttccttccattagaacaccaaattccatcctaatacaccacttaattcatgttgagtagaggccacgctgaaaactaatttttcaattcacagaacattgtgagctatttgcaaaagttgctgagcatataagttttgagcaaaattgtaatgtttgtgtgtggaaggccttccacaacttacttctgtgggccacttgatttatttcctaggttgcaccttttggaaacagttccccatgttaaaactttctacctaccagtggattgtttttattttgaaagtgtaatttgacatgtttgaatatgctactgttttgcctattttaacacaaatatgttatggcaaggtacaaacgtgtgaatttctacaattttgtcagtctatgaaggctgactggctttttgatgtgattcgctagccctttagagtaaacattctttaaaagtagaaaatgtttgctggcagctagctcggagacactaccttacgatgttcgttaaaaacaggaaagggaaaacagccagcatgagacgagtggagttcatttttgcagaagattaagaaaaattttgatcctgaaatcccaaagcatcaatttttttgagaaagtatttaagaaaaagatacttatgcattacagctctttatacatttattcaaatgtacatgattagagtttaaaatgattctaagtagctgaactacgttcagtacatttaaagactgttcacagaataactgggcttttttttccccctcaaagtgttttgattataagaggccaataaggattgggacaagtggaataaaacgaagtctttctatactgtgaagattttgaatagtacttgtcaataaagcacctcctattgtaatcttagggagccttgcctctgccctccaaggactgtctcagagatactaacctcattaaaatatgaatgagaaggcctgtgtagccagagaaaacccacgcactggcacagttttcttatctgccattgcttttacatatggacttgtttggtacaagttataagtagaaaaatgatccatgataatttcattgctatcttagagtacccaagcactccaagtcaatcctaacttttcccagatttgaaccccacctataactcttaatcatacttcctaaatgcagtgcctatttctccccctttacgtttcttctgaccctgtgcttgttgtgtgagcaatggaatgggggtggggagatacccatagccctactttagagtggaaagaagtacttgaaagttctggctttggcttctccagaagagaagagctagggagtttattacagacctctatgataacactttaataacggccaattacagcatgcctccatgtttgttcattactgtgtctctgttaatcttgtagtaaatttcttgcttgatagctgtcacaatcagcaggaatacaattatgttacagtggaaactgtcgttgtggtatatctgtctctcccattacagtctgacaacctccaataaatttcactcatctttatcgttattttggagtgtccttcagatatgaaaccagtacttaacctgtttagtgactgataattaatttcacattgtagcaaagattttctttctagaggtttagttaatgtaaaattttaattgcattgtagcaatattgcatctagtttaatcactaacttttcatccataaaaattgaaatcactgctgatattagttaaaagtcaatatttagaagtgaaaattcaaagctcctttgctctaggctacaacaggggaagcatgaattcagaaactcttgtaagctgatgagatatataattagcttttatgttaattgactgctatgagtttgttgtatgacacttcttcatataatatgcaaatagcattgactgtttagttttattagacaatataattagaaatctaaaggcactcatttcgatgaggaataataaaggctgatacatttccagtgttctgtatatcagaaaaaaatgaattgcatctggacgtaataagagaggttttagctagacattatttagggagcccaaaccacatataacggaattaataggagtgcttccagccaccgtaaactccatatttaaacacgtgaatttgtggtgtccataagaccttggggggaaaacacaaatgtttcagtacaatttaccacaaataataatatacttaatgaaaataatacctaaatgttgcctgctataattaaagtgaaataagtcattcttatttaaaacaaaatagtttgcgagtaagtgttccagttcttgttactcacagacattaccagtaacatatatgcttaggttgttcaaaaaaaaaaggtaataaaataagaacaatgtgattttggggggatatttttccagaattcatttttctttttaatttctggagcttattttcaacttaacagtgatcaaacagaaaaaaaaaaggcgtaatgaatcaacattaatgatctttccaaatgggggtcatctaacaatttgattctttatgaagttaaaaaacacactttccttttattattaaatgcaaaattggtactagcatttgctttcctattttaaaacgtattctgccagtttgaaaaataaaccctttaatttttgaacattttaggtagaatgaaaagaaatacaatctgtcacatgaaaaataccataagcttaacctctgttaaaaaatcttctaagcaaggactttgggcacccaattcacactgcacctcttggctgtgccctccggtgggcaccgctcagagggctcctactgctttccaaaaactcctaagaggagaaagtgacagtacgtaaaaaggcagaggcaacaatattgcggcataaacggagcatgatgcgaatgtgttcattcattcaacaaatatttactgaactccatctaatgtcagacaaatacacttctctaattccgacgtttaaaaagaggacgcttccgtgattctgcataaaaattaaaataaaatttttggaaaagaacatgtgcccagtggaagtccaataaacatgaattaatgataatataaccctttgtcatcgattgtcgtcaactgtttccttattttacagttttctgcccaacaaagatctgcatgtttcaccgtcttgttactgagaacataatggttgatgagtgatgatccgtttggaaccacctctgcaaaacatttccccaacctagaagagcggaaaagtcctatttttggaatctgttggggcatttcccaacttggtcttctgaatacttgcgggcatatggcaagacttccttataaaatgttagacgtctggctgggtgcagtggctcacacctgtaatcccagcactttggaaggccgagatgggtggatcacctgaggttgggagttcaagaccagcctgaccaacatggagagacccggtctctactaaaaatacaaaattagccaggtgtggtggtgcatgcctgtcatcccagctactcaggaggctaaggcgggagaatcgcttgaacccgggaggtggaggttgcggtgagccgagatcgcgccattgcactccagcctgggcaacaagagcaaaactctgtctcaaaaaataaagtaaaataaaataaaataaaataaaaaatgttagatatctaagaggaaaagggacaaatgaactggatgatgagtcaggaaattctgcgtgcttcatctcacagatgagaaagcacacacatactgcacacacgcacacaccacgccatgcatataggcacacagatgcatgcacacacatggattatgcagaaggggccagctggcttctggcaagcaaaccagaaaacattgtatggcttccggggaggcagagaccgctgcaagcagaggggcttcaaggtttcctgaccctctgctcttcctgacctgtggtccatgcacagggccacacctcaggagagtccctgctcatctggcctccacaccctggtcctggtctcaaggccgccccccccccccccggccccggccaggaactctttcacatcctaagaacaggcctcggtgattagaacaagaggctcttccacctcccagaccaccaggccatgtctgaagccacacctggagagctgctgcagggtgctgggctccccccatgggagacgcctcacccactgaaatagacacgattcacctcccccaccctagggacccggggaccgcagggtgtctgtgcatcccagatgcccgacatgaccccctgatgtccagtcacaaatcgagaggtgtggagggtggagggagagaccaggctgcctggggagtcgactgggggaaacgaggagattcggggatttctcggaggtgcatctcttggcagatttgtgctgctgactaggagtgctggggaaagggagaagttgtctggaactgggatgaaatgaggcttctctgcagcagggagggtagagcctcttttcaatgagcgttcattttctggttcccagggtctagaaagacagctctttctttaaaaacatttgttaatggaaaaaagtaatacatcaatttgatttctttaaaacaaaaacaagaacagaagggtagagtaaaatctaaggctcatccctcccccagaccccttaggcccccagatctcctcccgtgagaaacattccagttatgtgtctacatgtgtgagcaaatgaacgtgcacgcgtgtgtgtgtcccccctcctcttttacacagattaaagcatgacatgcaccctgtctattgctttgtctttgtcccttgatagacctcagggctaagaggactcattctgtgtccaggattcgaagggaatggtccactgaccataccctgaaacaagtgactcaaaagtcaaatccacccccatgggagacaagagttaaagaacaccatccacccagagggcagtttcaggaggggtattcccaagagttctgaatgatggcagaatatggctagaacatttgtgaaaaatcagttatgttgtttcagtaacagtgttcgagaagtttttgcatcaaatttactttaacctatgccaaaacaacagtctcagtgggagaggatgagagtttttaaccccacttcccaagtgaggaccccagtgtttcagggctggccagcgaggagcgggctggcacaggatgacagccagagtggaaccgcggggacctcaataggaactctcagatgaggaggctgcggtatgaccaggagacgcggtgtcctcaaggagtcacaggctaagctggatggaaacccacacagaagactgcgaccccagcctggggcacacccagtgcctccagaacgctgggtcacccagtaggagcaagggttacctcagctgaccgggaagctggtgatggcccagcaggagtctacttcttacagtcacaatgcctcagacccagtgtgccatccccaggaatgtcctgggcccagggtgacactcgggccattcccttggtcccgcctggccaccttctgttccctcctggtgactcctcggcctcctagaacctcagcagccctccgggaagcccttaggttgggctgagctgtcgtgggcgttgcctctgttggcctagcagatgggctgaaactgctgtgattggggtctccgccaccctggcctttagctgagacatggccgctggtccttggggcattctatttcctaatcaacttctgcagcagctgctgcatgtgccgtgccctccacaaatgaccaagtagggccatagctgtaggctgaatcatgtccccaaaatccatatgttgaagccctaaaccccgggacctcagaatgagactgtatctggagataggatctttgaagaggggattaagatcagatcgggtcattgaggtggccccttttcaaatctggccagtgtccttgtaggaagaggacattaggaaaccgacacgcacagagggacggccatgtgaggacgcagagggaagacgccatctacaagccaaggagaggcctcaggagaaaccagccctgagacaccttgatcctaggcttccagcctccagagccatgcaagaatgaatttccattgttagtggctcctgtctgtgggacttgttatacagctgcagctgtatccacagtcacagcgtgacgtcctcctgcctcaagttctgctaggtgcagcccaagcccatggatctgagcattcaccaagaacaggtgactccacctccaggaagcctggacaccatgcagaggcggccagcaggtccaccccacacgccaagcaacacaaaggtccctgcagggctgcacctgcacatgcaaaaaatggttcatcatctgaatttctcctgcaacacggcaaagtgggggcactgggctcggggtccgcccaaacacctgaatgctagcctggcttcacttttatccactggccatgggcggggatagccacacatcttcttgtcttctagcatcctcctctgtagaaccagggcgatgatatccaccttaatcaagtaattggttggaaaatccttcaaaacatttgatgcgatacagaaaggtgcagtgtttttattttatctccgatagccatcattgtcttagatcttaaacacctttaaagtggcaggcatttaagcagcacagtgatttctgtcctctcccttcaggtgaggagcaggaggagggacaccgtcctgcatatgacccagaaccaaggcccactggtcccttcacaccagcgggcattgaagagctttcccgtgaagctctctctgccgaaacccttctcctcccatcctctcaggatctgggagctgccaggaggggtggccagatccacagtgctcaaagggtggtccttgggccagcagcatggcttccgtgggagctcatcagtcatgcagagtcccaggtgatttgtgtgtacagccaactgtgggcagtgctagtttaggaagatgaggaggaggaagaggaagagggtggctacctgctgactgttttatattctgcttttgtgctttatctagaaagcatgcagcagagatcagaggaagggccatttggtccagagagaccctgattcacagccttgtcctgttccaagcaatgttgggatgagctgaagaagatgcctccgttctcagacccaaaaggcacaaagacggcacctttgggagagccaggcactaccagtgtcttgagtgctgaatattgtgcattcgaaagcaatgagagctctagggtggacctttcactggcactcaaagagaaccaaggaagcagagaaggatgataaatggcatcttagtggttcctggcacctgtcttaagagtaagatcttttactgtattacaaggctgggcattttcctaaaattgtttagatccttcgtgtcattattttctctcctgcatttctggtcttctgcagcacactccccaggtgggagagtggtgtccggggtctcaccctgcaggactggattccagtactcagggacgggcagcctgtgtggtggaaggctaccttgcgcaggcacatgccagccagactatccaggaagaaatgccgggaagaaaaaggggtcgtgttttctctgatccaccaaattcaggtcattctagagccaaatccaattccagtttagaaatgggtttcaatgcttaacacaccgcatcttatcctggctgcaaaattttttgtctaagaaataccaagttttgaataggctgtgaccagacatgtcatcacttcaggtagagagagggcaggtcatcagcgaacacctggagtgtttgaagaggccaccacaccccaggggccgggaaaggggtgacctgtgtcttgctgcttgcctagtgcttcctggatcccaggttcataccatctttgccagactggaaagaatggatgcaggctgggtgtagtggctcgtgcctgtaatcctgcactagagaggccaagacaggaggatcctttgatctcttgtttgagaccagcctgagcaacatagtgagagcttgtctctacaaaaaataaacaaaattagctgggcatggtggcgagcacctgtggtcccagctacttgggaggctgaagtgggagaatcacctgaacccaggaggtcaaggctgtggtggaccgacatcgcaccattgcactccagcctgggtgatggagcaagaccctgtctcaaaaataaataaataaataaataaataaataaataaataaataagaaagaaagaagaaaaatgggtgcaaagtataaagaacagattgaatccaaacctgacctgttattggtggcaaaaaaaaagactattaataagttaatattgttcctgttaaataaaatcttttgtgttgtttgcctgtttactcaagtaatgaaattcacacctgaagggaaacaatgaactcacaatcttagcatcctgacaaatcaaagtgtctctttccagccttcacccacatgtagctctcattctctatcctccaccccacatattcacactgaattcagacatttccgtggtattacacagcctccatatccacagttagtggtaacagagtgctcaataagaattcatagctcctctcatagttccttgactttgggacatttggggtattgacaacattttaaaaatgatcagtaactctgctatgaggatttctgtatcactttttcctgtagaattatttttgcggaacatattcctaagtttggggtaactaggtcgccgtaggtatacattcccgtatgctcatatttctggccgaggaatggaagagtgctcagctaagacagagacatctataaaataagctgcaagccaaatcacactgtgaatttctgtaatggtctcccctctcgaaagaggaacaggcagctcattgcttgggattcctctgaaacctctggctcttgtttatcctctccacttggaggcgagagcccatggtagaaggacagatagtgtgagcttcgttgtgccggccgagagcacccacatgcggtcccagggcatttcttagcgcctgctgggagtggccaccagttgtctctttttctttttctttctttctttctttcttttttttttttttttttttttttttgaggcagagtttcactcttttcacccaggctggagtgtaatagcatgatcttggctcactgcaacctccgcctccccagttcaagtgattctcatgcctcagcctcccgagtagctgggattacagcagttgtctcttttaagtccttcacgtcatttgtttccattttggcccctgcttattttttaaaaagcagatagatgtgagataattttgttccatttgaacaaaactttttcattatttaaaaattaataatctcaaaatgacattaaatgtcttccctcttgatgctgtgcattggactaagggttctctttatgttcgttaatacccagatcttgaaagagggttatgtttctaaatttggggtatgaaacattcccctttgactgggtgcaggggctcatgcctataatcccagcactttgggaggccgaggcaggcggatcacttgaggtcaggagttcaatatgagcctggccaagatggcaaaatcccatctccattaaaaatataaaaattagcctggcgtggtggcacatatctgtaatcccagctactcacaaggctgaggcatgagaatgaaaaaaaaagaaagaaggaaggaaggaaggaaggaagcaaggaaggaaggaaggaaggaaggaaggctggctcccctcccctcagaagctcctgaagagaagaaatcttagtcccgtattcttccaggcccaagaatcctcggctgtgggtggagcgagccttccaggaaagtcgccgatggggctctgtgattgtagagatcacatgcattccgtaaactccacccaggagctctgtgcgaaggactgacatgaacaaaaacaagtggtgtttctaatgggaaggaccaggtttctttacatgcaggggacccaagaatgacagacaaagaacctccccagagtagaaagtctagtgcacgccatgaagccaaacgctaagatccccttgcttgctcatggcccctgagcatcccctctgcacaagggtcctgctggatgtgaagatacagcagtggacaaagtgaaggggtccctgtcctcccagcacttgtggtctgggcctgaaatcgccaggcggcagcctccctcttatacagagtccctgggccgccgccttgtttatgtacagcccatgagctgagattggtttttacatttataaaggattgaaaaaaggtcaaaagaataatatttaatgacacatgaaaatgatgtgaaattcaaatttcattgtccatacataaagtttcgtgggacacagctgcgcccacatttgcgtactgtccccagctgagcagagtggtggcaggggcctggcacccggcaccctgagctatggactatgtttagagaagatgcttgccaggttccagcatgccagcctcacttcagcggccttgcacctgcagtttgcaacctgtgccctgccctgcggctgacatcatcctatctccggaagggcaggtccccaactgctcatgcccctgccaaatcatcttcctttctctggaggccaacagcactttcctcctagtgggcacaaccgaggttcctctagacgtgttgaacacgcacgtgcacacacgtgcccacatgcatccacacacacagctgcggcaccacgtggagagtcgggctgtgctcacccaggcgctgcatcttctacctgttggcattgactgaggatgccttctgggccaggagccatgaatggggctttgcacatatagaggtgcagtcttctgtgacagcctggcggggtgggtatcgctaccgcatgttgtaggccaagaaaccgaggccctgagacacacttcaaagtgggggaggcccagggtgtgactgtcacgccaggccatgtctctgcccatgccatcatgtggcgcacactctgtaagtgcctgttgacctggtttcctcgtggcctaaggtgggtgggcagtagccatgtcagggtgtccctgctgggggcttccatcccagctccagttcctaccctgaggttggcggcccaccccacttcagagaggaggaaacgcagccttcgagagggtgagtctcttgctcagggtcacaaaaccaggttagatgctgaagccagaagataaaccaggtctatctggagccaaagcctttctctgagtgtcagggccagagggggtgagcacctcgtcttcatggaggtgctgggatacctccacagtcctcgtaagagccactatacctgtctacaccaccatgcacactcccctggttacttcttacagcacgctagtcacgcatagcaccaggcaggtgcccccaaatgggttctagaacaatcagtgtcacggaactcagcctcccttctctttttccaagacaaccaatgtatcactttcctgccaaacgttctatggaaagaaccatttgaaaacagccagactcaaagctgaagcacattaaatccagcctccctgtatgggagctgcacggtgcccactgtgtcttctagctccttttgtcctgggggaaaaacactgcaatcctctaaacacatcccattatcctccattctttacccgatttgtggattcaaacaattcttattcagtggaataaggagcaattaacaggactagggatttattaaggataagtcatgccagacagttttgacagcttgttttgagggtgacagaattacaaaatccgaggctagatgcattatgtatttagacttttgtgcagcatctaataccaggcttgggaaattattcttgccaaatggtctgaacccgcctggatgagaacagtctcatgtaccggaaaccgactcaaagatcagagacaaaggatacatgacattcagccatgcacgggtcggtgtggcgggggcagggagtggtgtttcacgaggggctgcaaaggtcaatgttagggtttgtttcccgtaacatcttcattattatctggagggaagggcacactgccggccaccagggccgtgtgggagggtgggaagctccagcctctgggagctgatgctcaccctgcagctgctcagcagtgaccgaacatgaagaggccacagagggaccggagcaacacgggggctgggtcggtgcccccaacacccctgccacccaagaacaacccacagaaggtgggcggggacaaagcccatcagcctcatggacttggatagtggagagtgccccaggatcccccagtcataaaacctcagtgggttgggctgtgtcccccaaagagacactcaagtcctaaccccagtacctgtgaatgtgaccttattcagaaaaagggtctttgcagatacactcagctaggatgagatcatattaggataggatgggttctaatcccatgtgactgatgccttaccagtcacatggtaagagacccagaccacacgggggagaaaggctgtggcactacagaggcagaggctggggtgatagatctctaatcccaggaacaccaagagttgccaccaccaccagaagctagaaaaagccacagactagattttccctctgagcccccaagaaaaatatgagcctgccaacaccatggtcctggacttctggcctttgccccacgagggaatcatttctgcgtaagacatctggattgtagtgcttagttatggaagccggaggtgctaacggaagtctgatttcagaagtgaagaattaataatggagtccaatggcccccgcttctgccccgaggctagaggtggggtggtaaactcaggcactgcgcgagccacacctgccaaagtgtagattcattttccctccaagatacgaatgacaaaagaagaactttcctgtaaggcaggggtcctcaacccccaggccttggaccagtaccagtctgcaggctgtcaggaaccaggctgaactgcaggaggtgaacagcaggccagtgagcaaagcttcatctgtatttatagctgctccccattgttcacattactgcctgagctccacctgctgtcagatcagcagcggcattagattctcataggagtgtgaaccctattgtgaacggcacatgcaagggatccaggttgtgggctccctatgagaatctaatgcctgatgatctgccactgtctccaatcacccccaagatgggaccaactaattgtaggaaaacaagctcagggctcccactgattctacattatggtgagttgcataattatttctttatatattacaatgtaataatagaaataaaatgcacaataaatataatgcacttgaatcatccccaaaccatcccccccaccctccctggtcattggaaaaattgtcatccatgaaaccgatccctggtgccataaatgttggggaccgctgctctaaggggcctgagggaagactcataaaggttagggaccactgttctaaggggcccaagggaagattcaggtctattaggtggtggctagcacaaccctcagcacctggcagcacagctgcacctgttgtatttatgaaatggaacacacaggccatcagcacctggtgaactacccctaactccatgctatgctaccatcacctttctctctctctcagcacttcacaccctcagatgatggttatttttgtcgttcaggaatcttgaatcgcctgtttatttcttctccctgaggatagtatagcatttcatctttctttctttttttttattttttgagacagagtttcactcttcttgcccagactgtagtgcagtggtgcaatctcggctcactgcaacctccgcctcctgggttcaagcgattctcctgcctcagcctcccgagtagctgggattacaggcatgcgccatcacggccggttaattttgtattttaagtttctccatgtcagtcaggctggtctcaaactcctgacctcaggtgatccacctgcctcggcctcccaaagtgctgggattacaggtgtgagccaccacacccagctcatctttctttattcccaaattctaaatgcaatgtttccccctcttaaacagaatatttggttgatcagaacattgcgcttctgctcatgtaatatattctcctacagattttcaaatttgtcccagccagtaccggtaagaccacagactccatctcaggcccacacccaacagggcttagtgtactgcaaagctactgtctggataaacagggcttcctagaccccaaagccacactatttgtgtcttatctatgaaataccaattctgatcttgtggactctttttatatcatgctagtcttgatcagctaaaacctgacatcccagacacaacgtcattaaattaaatacccagtaggtgaacaggtgcctaactcctctgtttttcttgacattgtatcactttcctagagtcgtcacaaaatatcagaaatagtccccaactcctcatagaattaacatgacatagctattatcaactacttattctttcattttccagacattgagaacctattatgagcaaaatcttgtgctagggaatgggggtacaagattaaaaatgtaattaaggatagaaatgtgttacagtacatacacagctagaataaaatgcagaatttaacaaatatcctaaaaaatgctatcaaaatacttttgatgttcagaaggtgtgagagaatatctgatatcttatttttccacaaattcatctttgtaaaaaagtgacacagtgtcattccaactcagtgtgggggagcaaggcttatttgataaacggctctggtacacgctgtgatgttcacccaggaaacaccctccatgtcgactccacaggtagacggaaaagaaaagcatgcagtaatggaagaaaattcagaaagcgatttgtgtaacaaacggctggcaggggacattctcaaacaagacggggtgcccaatgccttcgtggacggggaggtgtccatgggggagaggagccaccgcacacagatcacagccagaggaggcatgcatcaggcgggacagggagagttactatccccacattcacaatggcataaaagacaaaccacccagtagaatactgggcaaaggctacaaatacacacctcgaaataagaaatccaaatagcacgctggtggaaagatgcttaactgcactggtagtcaatgaaaggggaataaaggcaatagcgaaataccatctttcactggttagattaccaaaattaaaagaatgctattacccagcgctggcaatatgcaagaaagcagcctctgtcacccactgctggctggaatatccatgctgcagcctgcagagaagcagtccaacaacatgggttagtgttaaaatgttcctacctttgacccctgcctttcaggaatctgtcctggagaaatccaatcaacaatacctaaggatgcagcaccacggaggctgcagcgtcactgtgtggtggcaaaacaccagaaacaatatgtgtccatctgtagaatggtcttcttaactggaaaatgtccatatcctaggcagccatgcttttcttttcttttttctttctttctttctttctttctttttttttttttttttgagacagtcttgctctgttgcccaggctggagggcattggcatgatttcagctcactgcaacctctacctcacgggttcaagcgatgctcctgcctcagcctcccaagtagctgggactacaggcacctgtcaccatgcccagctaatttttgtatttttagtagggatggggtttcactattattttaaaacgtcgaagccaaaaacctgcatagctgctgcctggtgtctgagcgactgcagtgctggcaagggcaaggctcttgactctgatgggaatggagcggggtcgggaggtagacatgcgtcttttctcttatctcttgctaaaatcatcatgtgttattttgataattaatttctttttttttttttttttttttttttgaggcaagttctcactgtcacccaggctggagtgcagtggtgcaatcacacagctcattgcagcctcgtcctcttgggcttagatgatcctccctcctcagcctcctgagtagctgggaccacaagtacacgccaccacaccctgctaatttttttttttttttgtattttttgtggagacaggatctccctgtgttgcccaggctggtctcaaaatcctgagttcaagctatcctcccgccttggcctcccaaagtgctaggattacagggctgagccacggcagctggccttaacatttttaacaaagaaatatttgaaaacccacatagagtaatgagacatgtgagtattcagcctacctgatttgcacagggcctggaaagccacacacaggggtcccggccgctgctgggccagtgcagggatctccaggagcctctcctgaggcgtggccctggtggccccgaaggagttcaggctccttccccaaaccttcaggcagcttgagagctcctttgctaaatagatgggcttattagtgggcctcaggaaccccctcaaatattagaaatcaccattaatcctgcatcgttgtagagaagggacagcagagctctctagaacacatacgcccagtctccatgtggctggagagggctcctttcctctgatgttttcagaaagttcaggaaaaaggacatgagaagggcccaaagagcctaattaactttgacttgacttcaacaatgggcaggagaataagaccccttttaatataaaattaaaacctctccaccagagccttatcctcgccagcactttctttcattgctttaaattggtcttctcggccttgtaggactgtggtgggcgggcccaggagcccagactcgcccattctgggcaagtgtgttcacatagctctgacaatgccagctctcggtcattgtcacgcttccttctctgtcccaggttaagctacgccgtggggggatcagctgctgccaatgtggaggccaagctgggatcacttcttcattctaactggagagaagggaagttcaagtccagcagagggtgggtgggtagacagtggcactcagaaatgtcagctggacccctgtccccgcataggcaggacagcaaggctgtggctctccagggccagctgaagaacaggacactgtctccgctgccacaaagcgtcagagactcccatctttgaagcacggccttcttggtcttcctgcacttccctgttctgttagagacctggttatagacaaggcttctccacctaagaaaaaacaactttgggctgggcgcggtggctcacacctgtaatcccagcactttgggaggccaaggtgggcagatcacgaggtcaggagatcaagaccatcctggctaacatgatgaaactgtgtctctactaaaaatacaaaaaaattagccaggcatggtggcaggcgcctgtggtcccagctacttgggaagctgaggcaggagaatggcgtgaacccagaaggcggagcttgcagtgagcagagatcgcgccactgcactccagcctgggtgacagagcgagactccatatcaaaaaaaaaaagaaaagaaaaaacaactttgtcccagccatgagtattctgggcttccgaacctggaggttccgaagaccccaggagagggaactggacagtcagctcccagcgagtagccagaggctggaagtagctgtttcccagtctttcatgagaaaccagaagtccgacgttctacgtgaaatcttgatccacattatgtgggctggatttggaccctgagcctccaaccatccacgtggctgggtcctttggccatcaccctcacccatcacagcttcagatgcctctggcctgtgtttgtttcctaacctgctgtaacaaagtgtcccaagctagggccttgaaacaacaaaaattcactctctcacagctctggagaccaggaggccaacactgaggaaccagcagggccgtgatctctctgcaggctcaggcaagggtccttccttccctcttcatggttccggtggctgctggcaaccctcggcattccttggcttatggacgcatcactgcccctctgcctcccagggcccttggcattctccccagtgtgtgtctttgtgtctccatcttatcttcttataaggatgctggccactggattaggccctgccccaccccaccctgctccagtatgacctcatcttaactgacaacatctacaaaggttctatttacaaataaggtcacccttcaagtttcttttcttttttttttttctttaattttttgagacagagtctcactctgtcgcgcacgctggagtgcagtggcatgatctcagctcactgcaacctctacctccctggctcaagcgattctcatgcctcagcctcccgagtaactgggattacgggcgcctgccaccacgcccagctaatttattgtatttttagtagagacgggctttaccatgttggccaggctggtctcgaactcccaacctcaagtgatccacccacctcagcctcccaaattacggcattataggcatgagccactgcatgcagcccacacttcaagtttctgagtggatgcaaatttgagaggcactgttcaatccagtgcactgcttcaccggatttggggcacggttccacaaccaccttagcctcttcctgtcctgctgatgtgtctctctccacatcggccctaactatagtcagaggtccacaactggcagcaaaggtttttaaatggaaataaacacacatcaccagcagggtctttttttttttttttttttttgagacagagtctcactctgttagccaggctggagtatagtggcgcagttatagctcactatcgccttaaactcctgggcctaagcaatcttcctccctcagcccctctcccctccatgacccctgcacctgcccaagtagctaggactacagatgtgtaccaccatgcccagctatatctttttaacaaagttttttacaaatgggatcttgctatgttgcccaggggtcttgaactcctggcctcaggcgatccttctaccttagcctcccaaagtgctgggattataggtatgaaccactgccaacggccaggcagcctcagatcattctttatatggctacagccacaacttcctctaaacattggcatgctgcatttgagtgaagaaaattcctgactttcatagaacagggtttctccaccctcagcactactgccgtgggggacccagtgatcctgtgctgtggggccgccctgtgcactgcggtgctgagcagcgtccctggcctccacccactgcataccaggagcctctcctcccctccagttgtgaaaaccaggaatgtctccagccactgccaaatgtcccttggggaacaaaaccatccccagttgagaaccactggcatagaacctaggtccaaaagtagaaacttgggctcagtcattctcctgggacgaaggctgtctgctctccagtctgatggtctccctgccttggccttccgcatagttttgttcaggtggagccctttgtgcagtttgtcttgacatccttggctataaactgagcacagaaccaatctgactgtccccagacacaacccgcctagttcccacaggcatgcgtgccctgcgtcctcaggccccagctgagagccggtgctgcaaacggtgtgaccactcactctctcctctagctgttcacaggcttctcattccagaaagccttttttgaaaggaaaatttgggctcacactatgccaaaattcttgacaagtaattgccttccgtgctaaatgttgatgtttttagaaactgagattcaagaaatagaatctaaataacatgtaggtaattaggctagccacgacatttaagtttgagaggcttcgacaactaatttagaagttttaaaacagtgtctggatggcgcagtctggtgttggacgccgccaagccttcaaccggctggtcctgacttataggctgctcaaagtgggtccttctcttcctctctctgcagcttaggatatcggcacttccctgtcagatggggttgtgcccacagagacacagccagcgttcagagaggggataattccttatttgtacttctgtttcctaagagcagccctgttgaccctttgggagctttctctgcattcagcttcacacaatcacaccaggcagacagcaaacagggaatcccagcaagaatgtcaggcccaatgggtgccggcctaagagagagcctgggcagagctccagggcggtgcctcagaagtggagaaaaggctcgttttgcttcaccagttccccagagccacctaagccctgagcctctggccactgtcagcccggaagcaacagcaagaagccccgagcaagatgagtggccctcactgtgcgcactgtcactccccctgcgtggatcaggttaaagtgtgagaaccggatcaacctggattccagactgacagcttgagcaaataaagcaagatatgcgtcagcatctgctcaaactaatacataagattttgcagagatcaatgtctaggaggatacttcataagttaaaatgatactaacatttagagaggaaatattggttctgaaaattcagcgtgattggttttatagctgattgatgacaaagctagcttcgtgggttctgctcacagaagagagctgtgtctctgtgtgtccctgcaggctctgtgtcttcctgtaggtcactgcctttcccaactgttcttaaacagccttctccagctctttagaaggaggaccccagatgggcccggggccgtggctcacgcttgtactcccagcactttgggaggccgaggcgggcggatcacaaggtcaggagatcaagaccatctcggctaacatggtgaaacccgtctctactaaaaatacaaaaaattagccgggcacggtggtgggcgcctgtagtcccagctactcgggaggctgaggcaggagaatggcgtgaacccgggaggcggagcttgcagtgagccgagatcgcgccactgcactccagcctgggcgagagtgcgagactccgtctcaaaaatagagggaggaccccagatgatccactgctatattttatggttcctaccacctcctcctaaaataggttgctgagaattttttttttcaatcaaatccaactgaaaagaatttgaattttaaaatcccataatacctctacaatatcttcccatattattacaatggaaaaactgcctcgctcatggagttcggtctgcaacacacagaccgaacttgtgtgcttgtgcctcgccgtctcctggctatgcgtgttgggagtccctgggaaccatgacggataaagttcatctcatcagtcaggaaaattcatgccctcacacaccacccgtctgagtctacagtcagaaaacaaaacgtgctcatttctcctttaccgctattaacaaccaaaagaatcccaaatcgatacccactcaacgtccttctaacaggtgcaagctctgcacatcgctagaggatcttctattgcagttagagtaaccaagcatacgccgtacagtgacaacatctgcgtggctcacaccacacaggcagccgcagaaacagcgcctcccaaacggcgcggcctcgctcaccctcaaaacccactccgcgcccgacgggaacggctggagggaggaaagagccaggcacctctcgttcggggtctgacattgtcacctggcagataagtgagtctgctcggatgtgccggctcggaacatgcccgttcgtcaaagagggaggggaaacaaaacgagcttgtgcctcattcccggtggctctccacgcaaagttaacgtttgtttactctaagcatatgcccaggtgaggcctgcacagccacctcgccgcgggtgcagggcgcgcctcagaatgacagcgaggtgcacgctccggcccgcgcagagcggggccagctccgccacccagcgcgcgggaagccccgcagcaccagcagggcccgtcgcttcgctccgtcccggtccggcgtgaaacccccgaggggaaaagcgggtatcaaatgtgaattccactcgtccacagcgccgggcgttatgaaaatctgagcacctttgaccggagaagcaatagctatgggattaaggcgaatttcttacggagaggagaaagatgtgcagtttgtaattacctgctccctgtagtacagtccgtccttcacgcctggatctaacgggacaaactctcagcggctttgctctcccggcattgtttcagcacccaccaagaggattaaaaataatctctttcccttttaattttgtgtcccccacatcccctcctcctccccacatcccctggggacagcataaatttttaatccctgaggtttgggagggggagggggtgttaaccccttgttgaggtggcggccggaggactggaagcccggggggaaaggtccccctgctggccccgccgggaagagcactgcgtccccctaggacactgacatgcctgccctgtatgtgcactgcagcgggttaggggccccaaaacaggtaagcaggaaaagccgcctttcctttcccctgacccaggcacagtctcctgatggcctcagatgcctcctctggtgcccagataggctgccagcccacgcagctgctccacgccttccctgtctctgctctgagataggtgactttgagctcacacacacacactcacacgtgcatgcacacacacacatgcacacacacgtgcacagaggcacacatgcacacacgtgcacacaggcacacacacgcatgcatagacacacatgcacgtgtacacacgtgcacagacaaatgcacatgtgcacttgcatgtgcacacacagacacacacacactcgatgcgaacacttgctcctcttcccccaggtgtgagtttccaccctggcctgatgacgtcaggccttagcatgtgggactgaccgggaaggcggatcagctgcaggggctgaggtctcagcctgctccactcacagcgtcgcgggatggcccactgcactgagcgaggcagccctggtggcaggtccgggcaattcatagaattgggtcctgaacctcccctactgcccccacagcagcaaggggctggcgtggagactggaacgtaatgggactccggcctccggtgaaggccacagtcaggccacaactaacatgcaaagcacagggctttctgggcactgagggagcgggcgctgggcggctcctgagcaggaaagaccaggctggggagtcagagctcagcctctgctcggtgtctgtggacaagagatgctggagggcatcacctatcttcctgggaggatgtgactgaggaggtcggcggttctctggctctggtgggcacaggaccccagcttggggaaagggaggttgagacagcccagcggtgacctggctgatgtgagagcagggctgtgttcagcagaaaaggcagctggatgcacagcacattgcaaagggcacggagaaggctccgctcaaaaacaaacaagtggcaaaacactcctgcatccccaattccctaatgccaaatccaacatttgtggggctcctgcctttgcctggtcagtatgcaagcacttgtgggatggacccagcattggtgccagggcttcaatcatcatggagtattaatgccagctgttcctatgtgccctgcctccaggaaggtgagctgtgccggaccaacagcagaagcttcaggggagagccttc

SEQ ID NO: 115 - DNA, 355939 bp, Homo sapiens
  source 1..355939: mol_type = genomic DNA
ctcccgagtagctgggattacaggcatgcaccaccacccacctaatttacaggcattacaggattacaggattacaggcatgcaccacccagctaattttgtatttttagtagagacggggtttctccgtgttggtcaggctagtctcgaactctcaacctcaggtaatctgcccgcctcagccaccccaagtgctgggattataggcgtgagccaccgcgcccggcccatggcccttcttgcctagaccaccctggatgtgcttggttttgtcatctgtaagacggtccctctcttagttgttatagggaccagctgtgatgacagaagtgggaacactttgcaggactgtggctgttgctcagcagccttggagtcaggaggagagatgaaaatcagaattgagggtgcttctgggtgagggacacaccctatactcttcgcatactctgcactggatcctcacggaaccacaatctgagtggtaagtagtgccctctcgtttcacagctgaggtggcagtttgcattttttcagagggctgcaacaagatctacgattccgcattttctctttgaaatatgatgttgacactttcccgtggagaggtggggtctaactctcctccctccactctttcagaaagtgacaccacatgacttctgagacttggccctaaaaggtgacacagcttccaactggctgacctgggacagtcacttttggaatccagccaccatgtgggaggcagcctgggtcacgtggagaggccacaaataagtatttgccatctgaggtccctgctatagccataagcaaccatgtgagagtcggagtgagaagcacccacactgagcccattaaccacagactgcacaagagaaatcaaaatgattttctttctttttttttaaagagaggaatttctctatgttgctcaggctgatctttaacttctgggctcaggcagtcctcccgcttcagcctgcccagcagctaggaccacaggcacacatcaacccaccctactaatgttttttaattctttacttttggtagagatggagtttcaccatgctgccagcctggtctcgaactcctgggctcaagtgatcctcccaccttgccctcccaaagtattgggattaaaagaatgagccactgtgtctggccaaaatcgccattgttttaaggcaacaagttttggagagatttgttatgcagcagtctgctaaccgcaatagaggagcacacaggggctcaatttgacaggtagtgacttgccagaggactcagctgatgtgtggcaggaccaggcagtgaatctgtgtcttccgaactccaaatcccatctttgccctgaccctgaacttcctcctttggtttctgggatggctcttactcagggagggtccccttttccctccccacccagcagtggccaggatgaaaccacagccagaggtgccccaggggcagtccacaaggacaggcacacccagacacgcacttgtggtttattacacacagtgatctccatctacacggaaatggaaggcaagcagccaggatggagctggttgctgggaacacttgctggaggtggaaaagcctctcgtcagagcgtgggtgggtctggtggcaggccccctgctcaggccagctgggaaccagccctgagctttgctttgcctgcacagcccacctagagagccatttttggccagagttctgggtgggagacttggggccagtgagacccagactctgagtgggaggcctgcctccctggtccaggccatgtcctatcttgtccctctctgggtgataatggaaacagagacaggaagtagcagtcagtccaggctgggcccctccatcctcgacactctgctccctggagctgggtccacatcacagcgatcacagagctcagccactactcctggccagaggacatgtgctctcatggcaggctggcctcctgaggcctcctgaatgtggtagagctagaccctcgtgggggatttccactcactgctccccgggcccagccgcaagtgctgggcgagtcttgtccgggggccaagtcttgtccaactgcagaggcagctggttgtggttgagtttggaggctgatgaggccaggagcaacagcagccgctgttccacccctgggtcttcttggatagggtgtgtcccagggactccagagttttgcgggggcaggttcttacagggcagtaccacagctgagagtctctctgctgatcaggtgactgaaggcccaacgtagcatctttctagccttgcccgagccaggtgcttctaccttcatctccttcctgggaaagcccaggcccaagggtgcccctcaggtacacatctccctggtctggcctgtccactttccggcagcttcacatgccggtggctttggggctgggtgggcatactcttgaatgttaaaaggccacaggtagcgcattccatgaaaaaagatcaatatattactgttttgtttttacaaaaattaaaaatgtccacacggatctgtacaggtgtgagctgggcctgtgggtcactggaaaaggaggaagagactgaaggtgacgaggagcccgagaagctccgcccccatccaggccaccttgcctggcctccccggtcctgcccatttcctcctatcttccctccccccactccctctcagtgggccagttgggacaatatcccagggggcactgatggctttgccctgcctggtccaggtgtcagttgagtccatgtgacccacaggatgggttatacaccatcacccaggaccacagccccacgcctcacatgcaagatgggagagtcaaaaccagggtcatgatgggaaacctggctattcagtcactgtgcgagaagccgcagacacccagaggtttgagtgacagcacccaggctctggggccctcccattcccccaccctcccctgcctctcccaagcctgccctggagacttccctgcacggtaccttatgccagcagccaggcacaggcagcccgtcggggccctggaaaggaagaaggtttcagtgatggggatggggcctggggagctcctctacaccccacatgccctcccctggtctgtagggaggtgcaggccagggagcggccatgtgagactgctgggccccactgaggcaggggcacaatgcctcctctgtccacccaggtagtggggtcatggggtcatggggaacgacggcctctcactgagcttgtcctgagtgtgttccctctgtgctttgtggggactgctgtgcagtgggcaggaacaggagggcactaggaagggatgagcattgtgccagacatgtacaggctggcctgggtcctgccgagagccgtgtggcttcctgtctgatgtgacagtgactctggcctgggtcctgccgagagccgtgtggcttcctgcctgatgtgacactgactctggcctgggtcctgccgagagccgtgtggcttcctgcctgatgtgacactgactctggcctgggtcctgccgagagccgtgtggcttcctgcctgatgtgacactgactctggcctgggtcctgccgagagccgtgtggcttcctgcctgatgtgacagtgactctggcctgggtcctgccgagagccgtgtggcttcctgcctgatgtgacagtgactctggcctgggtcctgccgagagccgtgtggcttcctgtctgatgtgacagtgactctggcctgggtcctgctgagagccgtgtggcttcctgcctgatgtgacggtcactctggctcctcaccctggggcctgcgagctttcaggccttgggcaggaatggctcctggagggttttaaggatggcccaggaattggcatcctgctccagcctgtgctggctggagcagggcaggctcaggttgctgggggttggggctgggcctggggtagggctatctagcggcacctgtggtgcccacccaggagccagacataagcaggggccgggtttcctcaggcagcctggagggtggggaaactggagaggaacgaagactgactcatcagggacaccaaggcgcaaaacatgtcattctgttccaaagcacaggaatgagcctcagacactgggcatcccctggaatattcccatgtgtacaccagggaccaggctaggcaccaaagggaaggtggggaggggggcagaatggaaaggaagcagaagcgaggaaggccggggcagagccaagggccctggctgccccgaaggcccacacagcacacggcacacggcacacagcaggccaggccgcctaccgcagggcatggcccattgcccctcgcagggccccgccagcctggtgcccctctccggcctccgcacgtgggattctcctgtttcaaaggagacaagggcttactgatttggaggggagtcctgggccaggccccggagctgcggggctgggccaccctgcccctgctgtccccgccctttctgtgcgctgaccacttcgctcttcaagtccttttctcattgacttctcaaaactgtccgaggggagcggtatcccccactgcagggataaggacactgaggaacagaggccagaggtctgggagggggtctctaactctggcaccgctggaggttgaggccggcctgcacacatccccgtggctggagtggccacgtctgaatatctgtccagttttagtacgaaaacccagctgttctgtttttcctgtcttttctgagctccaccggaagagtgtgacatgtaaaccctccctactttctagaaaaaggaactaggcagggcacagtggctcacacctgtcgtcccagcactctgggaggctaaggtgggacaatcgcttgagcccagaccagcctggacgacattgcaagaccccagctctacaaaaattaaaaattagctgggcatggtggtgcatgcctgtagttcttggctacttgggaagctgaggcaggaggatcacttgagcctgggagatggaggctgcagtgaaccatgatcgctccagcctgggcgacagagtgagactctgtctccgaaaagaaataaatggagctgacttttgaactgtggttgtttcaggcaccagtgcctgaaaccactggggctggtgggctgccaaaggccactgagagagcacagaaagaggtacaggaagggtgtgggggtaggcagaggggatgtggggaagagggaggtgctgccccagcccagagagactcttctgggaaggaggaaggaaggggaggcacagccagccagagaggtcagggtggtcccaccgtctgtgcttggggaagctgagtttcagctcagcttggcctcaggcccagtgggagtcagaccccgacttccaccccaggcagccagaccacagcgatggggctgggcactcactgcctccgcccccagcggcagcgtgtctgtgctaactttggttccctccgcagggcccagccccctcccagggcaccgctgatggtgctgatgactccaggtaaagcccctccactcctggtctaggccctgtccacttccagcccaagatggcccacagtgggttcctactcaagccaggcctgtcctgggggtgaagaatgaggggctgggcctccagctctacagaggggctgggttccctgagtcatgcccatggttgggggtggttaggaccagagcaaggggaaccgcgatgatggcagtagcagcagcagtggccctgacagtgaggaaggccagtgcgtgaccagtggggcctctgggacttgcagctgagttccgaggacagggaagatgttgggctgaccctggctggaggccaaaaagacctggggcagggccctcctccgacacctaccacgggacacggctggtccaggcctggtggtcccggctcgcccttctggcccttcactcctttccggccggggacccctcgttctccctgtgcaggaggggagatggtggtattggtcatggctgccaggcttaggaacctccaacatctctccgagagaagcgcgtggggccagcctccccctgcctccgcccacctgcccggcctgggttctctctacctgcttcacctgagcctccactcccacctgcctccttccccctctcctcctgccccagctcccgtccagctgccctcaccttctctccacgctcgctccgatcacctttctctcctcggggtccagggaaaccctgacaaaaggattagatgctaaacccgaaaatgaggctggaggtttgcccctctgttaccggctcatctctgttcctctcccatccacacgcccactttcccccctgcatattcgtggcacacgctggcctagccctagctgtaggtgatacactgctgggtacaaggctgatgtaggaagagcatgcatttacgatgccagctgggcttgctccaaagtagtcgctggacaccaacactcaggcagagctgctggcaaggggctgtctctcacatcacagacgcggctggcactggtctaggcttggctggggacagagaccccggaaaccatggaagttatgtcactgtctgatgggatgagaaatggtgatctctgttctgtgcccttggctcaacttcctgcacacccatctgtccattcatctatctgtccgtccacccaaccaaggtggcttaacatccactaggaaccgggctgttggctggacactggggacacagaattggattcattgtggccgggcatggtggctcatgcctgtaatcccagcactttgggaggtcgaggtgggcagatcacctgaggtcaggagtttgagacccaccctggccaacatggcgaaaccctaaaaaacacaaaaattagccgagtatggtgatgcgcgcctgtaatcccagctacttgggagactgaggcaggagaattgcctgaacctgagaggtggaggttgcagtgagccgagatcgcaccactgcactctggcctgggcgacagagcgggactctgtctcaaaaaacaaacaaagaggccaggcatggtggctcccgcctgtaatcctagcactttgggaagccaaggcaggcagattgcttgagctcaggagttcaagaccagcctgggcaacacagtgaaaccccatctctcctaaaatacaaaaaattagccgtcctagcagcgtgcacctgtagtcccagctacttgggaggttgaggcaggagaatcgcttgaacccgggagacagaagttgcagtgagccgagatcatgccactgcactccagcctgggtggacagagtgagactccatctccaaaaaaaaaaaaaaaaagaaacaattttaaaaagagaattggattcgacatggtcccttgttcacgtgtaacggggcaggcaagagagtgctgatgacagtcaatgctcagtgacagaggtgtgaaataggggtggtgggattctggagggaagggctgttctatcacaggtgggggtcaaggggagtttctcagcacggtcctcattatagttgggccttctggggttgaggaggagcctggcatttgccaggtagagcaggtgggcatggctttgagatgccaccctgagaaccaggcctcctggaaggcagctgtggccacattcatggtggcatggagtctccttagctccaccctcaactgggcccagagcctgcagctggttcagcattgtcctctcccatcccttcccattgatggaacccagcacccccgtcagaaacccaagctacagctcttcctttccctcgtccacagttgctctcccaggtaatgttcttttttttgagacggagtctcactctgttgcccaggctggagcacagtggcacgatctcagctcattgcaagctccgcctcctgggctcatgccatcctcccgcctcagtctcctgagtagctgggactacaggcacccgccaccatgcctggctaattttttttttttttttgtatatttagtagagacagggtttcaccgtgttagccaggatggtctctatctcttgacctcgtgatccacccgcctcggcttcccaaagtgctgggattacaggtgtgagccaccgtgcctggccggtaatgttctctttttaaagtctagggtgggcaccagagtccttgcagccctgcatctgggcctatgtccctcaaaatagctacctgattttcctgagaacaacctccttctcataacccattgattccaccccagtccatggtctcactagtcagggcactgcattcctatggctaagtgacagttcagcgttgacctaactgggaccagggagagcccatgaaacttcctgtagaacactggagttctactctggagtcaaattttctttcttcttagtttgggcctggcaggatgctggtctcgagctgctggctttacctcaccaccacgtggaacttgatttccacagggaaagcagacaagacagggtgaaaggctgagttgtgttgacacagttgagccctggatccatgtgttgaacctccagatttttcagttatgagtaattttaagccagtttaaactatgttttctatgtatgctaccagaagagacttgacataatcagcctgggctaatacttcccttcctcttcttctcaaattactgctctagctaaagccctattatctgtcaccaggatattgcaacaggctcctcactgctctcttcacttccttgctacaatgcatcatccatccatccatccatccctccactgccatcatcatccatccatccactcatcatctatcatccatccatccatccatccctccactgccatcatcatccatccatccactcatcatctatcatccatccatccatccactcatcatctatcatccatccatccgtccatccatccctccactgccatcatcatccatccatccactcatcatctatcatccatccatccgtccatccctccatccctccactgccatcatcatccatccattcactcatcatctatcatccatccatccatccatccacccacccatccactcatcatctatcatccatcatccatccatccatccctccactgccatcatcatccatccatccatccatccatccatccatccatccatccatcattcatctattatccatccatccatccatccatccatagtggatagatagatgaatggatggatgagtccattcaatcctccatccattcatccatcattcttccattatccatccacccacccatccatccatcatccattcatcatccacccacccatcatccacccacccatcatccactcatccatcacccatccatccattcacccatccatccattcacccatccatccattcattcatccatccattcacccatccatccacccatccatccatttatccatccatccatcaatcctgcattatgcattcatccatccatcgattcatcctccattgtccatccatcctccatctaccaatgtatccatccatttatccatccatcaacaatccattcatctatccacaaaggacctactctgggtcgtgcactggacttggcaatggggacacagggggaaccagtcagttgcagtcccagccctggggaaaggggtcacacttgagtagccagatcaggttactgcatgagggcagaagatacacacaagaggcacccaattactcaaagtgatgataagacacttacatctagtcctggctccccgggtctgccctgaggagagacacagagtgggtgagaggggttggggaggggtgctgggagcacagctgctgggaagtccagccctgtgggttggccacagacatgggggcaaggagacccaccaaccacgcaggcatagatggaggccaggacagacctggcatccacagagcctgaactctggccctgcgaagtgcagggacccagtgaggtacagggttggggtccccgggctgagcgccaccatgaccaggtggccacggttggagagggagttccgaatgaggcggttaccttctctcctttggttcctggcagcccaataaggcccggtgggccaactggcccctggatagaaaaggaatgagtcaagaggcatgctagtgacaggaattaacacctttgggacaaacaacgcttgtgagactcacaggcaggccgctggggcctctctcacccgacgcacccttctctccctttgctccatccaagccctggaggcaaaggagggaaatcagtcaaggggaaggggttagacagacagtaggacaggcaagcttggagactgcaagggagctgggatgtggacagaggaacagatcgaggctcccccaggcctggccccagcttactccctggtgagggtgatcaggaggagctctggccatgcgcattgcgccttttccagaacaggctccctcagccccatggaaggtgattacggtcacacccattccaaagatgaggaaagcaggtgcagacggggggcggggggggggggacaggcccagccacacagcgggaggcagcagagctgggtccccatcaggcttctacggcaagccttggaccctgtcctgatagcagctgcctctttgaaacatgaactgtggtggccttaagagaaagcagaaccagaagcagagcacctggtggggctgcaggctcgggcctgggcttccacgattctcagtcccacatctggcctctgagctggggaagcagagatttgctcacgccaggagggtggtgtgacaaggagtgaggccaggtggcctccccttctgtgtctgcctccctggggcagggcatgcaggcaggccacactcgaggacttaacgtaagagcagggaacacgccatcatgtaatatacaccaagcccaagactttgtgcttagactgtggcagctgagagacagatgtgtgtggggcgggctgggatggggagaggtggggacagtgcaaggaactgacaggcacagacaaaggagaaggggacaagcagtggaaacggtggtggacctgaggaggagagagggacagactggggtcccgggcagagggagaaagtgggagaggagagcctcaagggtggagaggggggcattggcctcaacgacatcggggaggttatgccctggggacttgggacgttcaggcgctgggaagactcagggatgggccagggcggagcgtcaggccctttgctttgcccattggcaaggctcttggaaactgcccagacggtgagtctgaggccagtagaggggtctgtgcccactcaccttgggaccctggattccctggaggccctgcaggaggaggaagcagataagaaggctggctccggaccctcttgcagtggccactcactggcccctggggccctgtcctgggctctgccctctgcccatgtgcccctccctgaacgaagaagcccgctctctcctgggtcatggctctgggacctagcccccaccccgcctcttggtttcctggctgcttcaaaccaaaccaaagcaaaccgtccttaccatcgggcctggggggccaggggggccagggggccctggctccactatgagctgagcctagggagggtgagagacaggttagtcacccaccgcctgtcaccctcacctacccgcacccgagctcatcgcacactgctggatcgagagtctccttcctgccccccagagggcagagtctggtgagcaggtggcagctggtctgcggagcttatagtgagccgaggttgtgccactgcactccagcctgggagacatggtgagactctgttctcagaggggtctcgctccccttactctccctcccctactgccctgggtttgctcaggccaggtggcctttttgtcccaaggctcagggtccccacccagcctggactgggtgttgggggaagccctgacccccccatacccccttaccaggctctcctgtaggctgtcagacgccgactcccccttctcccccttgaggccgtcagcgccctgcaggacggcaatggcctgtgagtcctttgtgtccagcacctgtatcaccacccacggtgcttagtgacctcccttccttcccccatgtggctcctgagagcagtcatcagttagctgttgcaactgaaaagttttccctacatccatgtgccacgccccgggtggtgggcagtgtgggctttagaaagcacacgagcagccgcacacattgttttcctggggtgcagggagcaaccgggggctgtgaagcaaagaccccggggtcaaaccccagtgccccctctagcccagtgaccatcagggatggacactggaagtgtcccagtggtggcgtaacagctggtggctcttccagtcgggccacaaaagcaacgaaaatcatgaggacaacagtgggcatttgctgtgtgccagccaccactgtcagcccagccacgcatgcccttgagggaggggaatgatcacccccactttggaggtgaggaaaccgaggccccaggaggttaggttgctcgcccagggttccagagtcagccgggacggagctggatgcaaacttgggcagtttaggtcagagcacgtggcataaccacctggccaacgcgctcccatggccacagctcctgattttagctgccatctgaggcaggtggaaggcttcttccagacgaggaagtggaggccgggagagaggaggacagcgctggcccagagcctagagtgtccccggccggctgggcactgagaccgcaggggctgtcagggtcacgccctggcctccccacagcacggggggcacacagtcacctcagggcttccacacaggaggcgtaatgtgtggcccaacccagccacataccgggaggccggacaagcccatctcgcctgcttcccctttgagtcctgctggcccaggctctcctgggtctcctttctgtcctttggggccctgaaagccataagcacaagggatgagtggggctcaggaggtcccctcccttctccccccagcaggtccccagagcttagttcatgctagggccccactttctctttgtgggtccccacctccagccacagtggctgggagcctcacccggatgcagtgggtgtggggctagggcacgccactcctggctcattgcatccgggtgtgggcaccgcagggcaggggccggggcagatgggtggatcatgtgagcctggagctgcccctctgggggcactcatggggccagctctgtgctcacatctcagaagctagtggtgggactccccacccccacaaactcttccagccaccgaatccctccattcaaccaattacattatgtccaggatgagacacacactgcggacccagtgggaaagactcaccctcgaatagcaagtgaccccacgaatatgcttacgtctgtataggataacacacacacacacacacacacacacacacacactctctctctctctctctctctctctctctctctcgaattggggcaatacctacaatgctcttagcctttgtggcttttcaccacatgccaggcactgcactgagtgttctccatacacagagttactcagccctgcctgagagcaggcaacttgcccagggccggagggcagaccagggtttgcacacaggcagcctggtgccaaaatccatgatttttgattttctcacacatggtgtttctctaactctgtgcacacatgcacacgcacacacacacacacacacacacagagcccaataccaggcactggcatcaccaaggaaatgaaaggcccagagaccttctctccatcgattcctggggcaccgggcaatccaagctcgccctggaagggaagagatggcaagaggggttatgccttcctttcctaaagaggtgtcagcagccagagggccaggacacactgtgcacccggcccagggtgggtctttgcagttggacctctagctgtgccaggacccaccgcctcctctgtttcctcagcccatcacgagcagatgtagcccatggctatcacctgtaagttgttatgtcacagattcgggcgctgaggcttggagggttaagtgacttgcttcaggtcacagagcccaggaacaacgatgccgggaccagatctgcctgacttcaaagttgttggctctttctcttgagataaatgggcaggatgcaaacgaatggtgcaggccacagggtgtgcaagctgtccacctgccagactggtgtgctgtcacaggggctgggttttcagttctttatttttagctggtggatatttataaaacactacccccaacagcagctaaatatacatttaatttgtgtgcatataaaacattcaacaagaaagaacactttgactctaaaacaagttttaatacattaaaaagatcaatattgtattaaaaagaatatgttttggctgggcatggtggttcacacctgtaatcccagcactctgggaggctgaggtgggtggatcacctgaggtcaggagtttgagacagcctggctaacatggtgaaacccccctctactaaaaatataaaaattagctgggcttggtggcacaggcctgtaataccagctacttgggaggcagaggcaggagaattgcttgaacccgggagacaggttgcagtgagctgagatggtgccactgcactccagcctgggcaaaagagcaagactccgtctcaaaaaaaaaaaaaaaaaaaaagagtatgttctctaatcgcaagataatttttttttttttttgagacagagtcttgctatgtctcccaggctagagtgcagtggcacaacctcgactcactacaagctccgcctgctggtttcaaacaattcttctgcctcagcctcccaagtagctgggattacaagtgcgcacaaccacacccagttgatttttgtatttttagtagagacagtgtttcaccatattggccaggctggtcttgaactcctgaccttgtgatccacccgcctccacctcccaaagtgctgagattacaggcgtgagccaccgtgcccggccgcaagataattaaataagaaattaataaaatatctggtcagctggatacattaaatatgaaaaaaactaaaacaaaaaagcaagatacctggaaaaaaatctccaagtatttctaaatccccaagtattctctaaataatccatgaataaatcaaaagagagcttagaaattatgttgaactgaataaaaataaaattcaacttatcaaggtttgtaggatgcagctaaagcagatatgcttataggaaaatttatagctttaaaaaaagttttagattcagggggtacacgggcagggttgtcacatgggattgcacgatgctgaggtttgggcttctaatgattctgtcacccaaggggtgaacatagcacctgataggtagtttttcaacccttgtcctcatgcagctataagacaaatgcttgggggaccacatagctgctcctcccttttggaatctccagtatttattattcccatctttgtgtctgtgtgtacccaatgtttagcttccacttttaagtgagaacatgcagtatgtggttttcttttcttttctttctttctctctctttcattttcttttcttttttttttttttttattttgagacagagttttgctcttgttgcccaggctggagttcagtggcgcaatcttggctcattgcgacctctgcctcccaggttcaagcgattctcctgcctcagcctctcaagtagctgggattacaggcatgtgccaccacgcccggctaattttttgtatttttagtagagacagagtttcaccatgttggccaggctggtctcaaactcctgacctcaggtgatccacctgcctcggcctcccaaagtgctgggatttacaggtgtgagccaccacgcccagcccattttcttttctgtattaattcacttaggataatggcctctggctgcatccatgtagctgtaaaggacgtgatttcattcctttttatagctgcatgaattttcagtttaaatgtatgaataaggcttcccagggaaatctcccagagtagatcgagcccaggaagaaggcactcagcctgggagcccaggcccgttctctgagctcccggaagccaggccaggacacccggagggaagtggaacagggtcacagagcagacaggaagagggaggtgggccctggagacaaatgcttgggggaccacatagctgcatctgcactgaccttggctccagggatccctggtggccctgggggcccctgtggtccgggaggcccctgtgtgtgagagtgaagccggtcagtgtcatgggttaggcagggcctcccttcgctacccatccagctccccacctggaatcaagtccccgtccagctgagcagagcaggggcagggtccttggggactgcttcttccccagtcaggtcaggccacactgtgcaaggctttatctggcctcccaggcttgggggaggccaggaggtgacacccagcatttgacaagacaccagtgtctgctgccatggacggccctctgccccaatccagatttcttcacgatgttcccctgctcaagatcttgctttggctccctattgcctctcaaagcaagcttaaatcccctgctggcattcaaggcctgccaagaatgacatccccaatggtggcccagcaccaccgtctctgactgtcctgtgagctctctgaccttctggctctgctgcctgccatctgctgggcctagggagttccttagtctcgcaggtaggggtggggtctccagtgtttccaggtccgaccccactctcaagctcctgtcctgatccaggctttctgcaggctacctgccaccagggcccagctggccccctgctcagcctccacactcctcccctcccttctgaaaaactgcaccctgcccagcccctgccccacccctgccccggaagctctaggtctctcccctcccacctccctatcctgtgcccttcttgttggtgtcccattgagatgtccctggcctccatcttatctaccctcccccaggcccaggcccaggacctccctgcctggggtccccctgctccctgctccaacacctgctttcattcactgtccatatcattccctagctagccttcccccaatatgtttttattttttattttttttttatttttgagatggagtctccctctgttgcccagcctggagtgcagaggtgcgatctcagttcaccacaacctctgcctcccgggttcaagtgattctcctgcctcagcctcccgagtagctgagactacaggcgcgcaccaccatgcccggctaatttttgtatttttaggagagacgcggtttcactatgttggccatgctggtctcgaactcctcacctcgtgatccacctgcctcgggctcccaaagtgctgggatcacaggcgggagccgccgcgcccggccgtgtttttatttttttaacatcatgccctgcatggactatggctgcccgctgcccatcaaactgagtcggcatctcagtctggcatccaaagtccatctctggctgggcgtggtggctcacgcctataatcccagcactttgggaggctgaggtggcaggatcacttgaggtcaggagtttgagaccagcccggccaacatggtgaaaccccgtctctactaaaaatataaaaattagccaggtgtggtggcgcatgcctgtagtcccagctacttgggaggctgaggcaggagaattgcttgaacctgggaggaggaggttgcagtgagccgagatcacacccagcctgggcgacaagagtgaatctccatctcaaaaacaaaaacaaaacgaagtccatctcccaactccctgcactcacagggcttctcccacaaggctaggtcagcctgggacacatcatgcatgtgcctgccgtctgggccatgccacgccacaccacgccacgccacgccacaccatgcatgcctgggggtgggtgccacagttactgccaacttgtacttccccaaagcctgtgggagataactggaaatgatgttcaggtggggccagggcccccttcccagtctggtctctggtgaccactccttcctcacccactttccttctggggtacccatgagctgctggcacccagtgcctctctccactggtggtaagtcccaagtttaccagcgactgggctcggaggtcacatatctcccaaggctctgggggcagagcttgccactctcatcctccccatggcatcattaggagacctagccctccagccagtgtcctctgggaaggtcccaggagacaccggtgggaacagaccccaggaaatactctgcctcctgcccctgagtggggagcttccctttttgacttggcctctagggagctcggggccacgtgggccacattcacaggggctctctgaggcgggtctcaacatagccctgatttccacattgggtgcctagtaacagccggggtctttgtgctaagctgcctctggtcccttgtgtaaaaaagtgcaggattaatcacaaagggagtgattattccctaaggaaaaatcgtatctaaggcacatcctggtcccaccaggaacactaccttgagggcatccaagatcctgccatcatagtcgatcaccactgtgtctccctgctcgcccttgaggcctggggcaccctgaggcaggaagaagagtaagaatttcagggaagagctacactgagttggaggtgaagtggcagctgtccctgcatcacatccagagagaaagcaatggaagagcctcgtcacccaggctgcacgcatgcccctccccagggtggatggagggaacgggaggcaggccctgtggccagctgagagacctgtttccacctggtctgaggggcggctgtaattgccctcacgtgggcattcaggcctgacccctgagttctcgggggcaaatggaaagcctgattttgatgtgacgctcttcagatttttcaatgttggcaacaaacagaaaagccccaaaccctccaaaacacaaagacatgagcaggctggatctggcccccgtgcctccatttcccagcctctgggagcggctgcacacgccaagcacccacacgcctattcccgcctggttacaggtgcatgtcagcatgcccatgtccatatgctgcacactcattgtgcacactcacacgtgcacgcatggctgctggccagcccttcccttgtgaacctcacttccccacccaggctgctctttgcttggggtacagtgaaggctggggagcactttggtccagacccgagcctatcccttgtgcaggctggagacccttgcttgggcctcatttgccagccctcccccgtccccagtcacagcctgcccagaactgcctggctcactggctgcctaatccaaccccctcccgctccccaccacctgcacagccaggcgggggctcagatccattttttttggaggaagaagccagcctctgggagcatgaggagacagagccgaggccaggatcccggacgtcaccctaaaggtaaggtatgttgataggggctggtcacaaaagatctggggcaggctggggtgctgtgctcctggtggcagggacaaacctccctgtggggtggggaaaaggcaaggcctggcccactgtggcaggatcaggcatacgacaaacagaggacctgtgtctgaatacataaagaaaggaatttaggtggacatgcgcttgaggggaccgagagagatctggcttcataatagcaggtcaggactcttatttttgtacctccatatttgaacattttaccccaaaaaagcatgtactctggattttcaaaaatcacgaataaatgagtttaaaaagtaaaatactcccagttcctgtagctccactgctcctctggggtctctgtggggacaggggcttctgaagctatggggcccctagatctcatccctgaggcctcgcctgaggggcggcagcttacccggggccctgcagctccatccgtgcctcggtggccaggctccccctgtggagacatgcatttgcagccagaggtgcagctgtgaagccaaaacacacctcccacgaccctgcccccagtcccctcttcccaggagggcccagggcccgagtgctggaaccctaatagccaaatgtatgagaacagcactccaggaacggggctcctccaggggcctgcgagaccctcctctgacatcacttcgtatagagatggggacgctggtgtccaggagcctgaggctgcatggtgagttggccacaaagctgggcaccagtggaggccttgccactcacccagattcaccaccgctgcccccacaccagcttctgagagtgctgagggagacccctgggtcaggccctcctgggacttaaaagggcaaatgagagctgaaaccacatctcccactcccgactgggtggaggtctgagcggggcccgcaggcgccagagcagagagctctcatgtcaccttcggtcctggggcaccgtccacaccgttctctccccgaggccccatgctccctggctcgccctgaaacagacacagctgcagtgagagcaagtgtgagacggcacgtggcgggtgccttggaggggggcgtgcctcggggttgcctgaagcctcgcgattaggcctcctggcaaattgttactgagtccatggggggtgtgggcggatggacctcaggcctctccctagcccaggggactcaggaccacggccgccaccttctggtgtgggccttggcacttacttggggcagcgcaggggctcaagggacattttggagactggctggccaggatttggtggctgttgcgaggggttgggggagcaaggcatgaggatgacacccagttcctggcttggggacagggcagagagtgaggccccctaagatggaaacaagagggcttgagggagtgagggaggcacatggcccgggtgagacgctgggcctgttgtgtggtggggccgcggccttcctctgcctctctccggcctgcgctgggcactggcctaggaacccgtggtgccaaaggtccagggtagggacttcaccaggtagatgggaaccatgggaggtgggggcagggggccacgagaggaggggcagatactcaccttgggccctggtggtccaggctggcttggtgtcccatcgtcgccctgaggagaggacacctggggcttgccggtcagaccctcgggtggccagtgggcccctccctcctctggacttcccagcacaccagtctgctcctggcatctgcactggcacatggtaccaggcagctcctccccaccctccttgcccctccagggcaggtgtggggtcagacccatctctgtgtgtcccctgttcccaccagcccagggctggcatttgcagaaagaacggatgggcaggtgaatgagggtacattcatccattcattccccctgtgggccaggcagctgaggtccctgctcaggtggggtcagaggaggccaaggaaaatattcaaataaatacgaggttggctggcactgtggctcacgccttaatcccagcactctggtaggtcaaggcgggaagactgcttgagcccaggagtttgtggctgtagtgccccatgatggcacctgtgaacagccactgcactccagcctgggcaacagggcaagactccatctctacaaaaaccagaaaataaaaaattagccgggcatggtggcacatgcctgtagtcccagctatttgagaggctgaggtgggagaactgcctgaggctgcagggagctgtgatcatgccactgcatcacagcttgggtgacagagtgagatcctgtcttaaaatatatatatatatatatatatatatacacatgcaaatcaattctaggcaccatgtcaggaagtggagaagagaagaggatggcctggtggtgagggactgcagggagggcttgtttcagcaggtggccagggaaggtctcctggaagatgggagaggtttttttttttttttttttgtaaggtgagtctcactctgtcgcccaggttggagtgcagtggcacaatctcggctcactgtgagctctgcctccgggttcacgccattctcctgtctcagcatcccaagtagctgggactacaggcgcccgccaccacgcccggctaattttttgtatttttagtagagatggggtttcaccgcgttagccaggatggtctctatctcctgacctcgtgatcagcctgcctcggcctcccagagtgctgggattacaggcgtcagccaccgctctgggtctggttttttttggtttttgagacaaggtctcgcgctgttatccaggctggagtgcagtggcacaatcatagcttactacagcctcaacctcctgggctcaagcgatcctcccacctcagccttggaagtagctgggactacagatgcatgccactgcacctggctaatatttttgatttttagtagagatgaggtcttggtgtattgtccagggtggtctttttttttttttttttttgagacgagtctcactctgtcgcccagcaggttggagtgcagtggcgcaatctcagctcactgcaaccttcgcttcctgggttcaagtgattctccagcctcagcctccagagtagctgggattataggtgcctgtgaccacgcctggctaatttatttttggatttttaggagagatggggtttcatcatgttggccaggctggtcttgaactcctgatctcaagtgatccttctgtcttggccccctaaagtgctgggattgcaggcatgagccagtgtgcctgctggccttggaggagggttttgctgagacctgaatgaggtgaaggaggaggctggcccaggagaagaggccggggaggataatgctcattcagtgttttcaagcttgagctcacatcagtggcaccaggggctggtcaaacaaactctggccccatcccagagtctctgattcagtgggtctggtgggccccaggaccacactttgagaactagtgccccccagccctgaagtgggcaggaatttcatgtgttcgaggaagggaaagaatgagtgagtgaataaatgaatgaatgaaatgaattctggcctcagggagagcgaggacagggcagccacctgcagtgagggctcagggctggtggagagaaggccgccttccctgtgggttggctcccagcccatcccgtccccatccccatccccattccgtcccagcccctgcccttctctccagccacttcccaacactgacccggaagctcctccattggcccctctcaccttctttccaggtactccaggctcaccctgggggaggcaatggggggttcaagagcaaggtcaaaaccataggagagtggcccggaccccggacctcttgttcctcgggtagaagtggcactgatgacccgtgcccagggccagcccagagacccctgaatgcttcagagagctgcggcggacagtcttgaattccacttctgagccactcactcccaagctcaatgaccctgggcaaggcactgttcttgaaagtggagaggtgactcctgccgtctcagagggttttggaggatgaggcgctggctaagcaagctctttcccatccttcctcctcaggccagaggctccgtctccgtcagcgaggaccagagcccgcctccccacccacaccctccccaaagagggcgaaaatgaaagagctggcatctgcagaggctggacaagctaacatggtgggaaaccacatccacgtgaaaacctgcacatggacgctgacatcagctttactcaaaactgccaaaacctggaagcagccaacatgtccttcagtcggtgagtgggtaaataaactgtggcttatcattcaataaataataaacccagacatggactatcattcagtgctagaaaggaatgagctgtcaagccatgaaaagacatggatgaaaggtcaatgtgtattactaagtgaaaggagccaatctgaaaaggccacacactgtctgattccaactagatgacactctgggaaaggcaaaactatggagacagtgaaaagagatcagtggtggccgggcacggtggctcatgcctgtaatcctagcactttgggaggctgaggtgggtggatcacctgaggtcagaagttcgaggccagcctgaccaacatggtgaaaccccatctctactaaaaatacaaaattagccaggtgtggtggcgcacgcctgtaatcccaggtacttgagaggctgaagcagaagaatcacttgaaaccaggaggcagaggttgcagtgggctgagattgtgccattgcactccagcctgggcgacaagagcaagactccatctcaaaaaaaaagataaaagatcagtggtgtcaggggctagggagaacgagggatgaacaggcggagaacagagcatgtttagggcagggtaaatactccatgacaccacagtggtggatacttgtcaacacacacttgtccgaatccagagtgtaccacagcaagagtgaaccctaatgtaaacgacggcatctgggtgatggtggtctgtccacacaggtgggtcatctgtagcaagtgggggatgtccacagcgggggagggggatatggaaattctgtactttctgtttagttttgttgtgaaacaaaaactgttctaaaaataaaatctatttgggccaggtacagtggcttacacctgtaatcccagcactttgggaggctgaggtgggaggataacctgaggtcaggagttcgagactagcctggccaacatggtgaaaccccatttctcctaaaaatacaaaaaattagctgggcatggtggcacacacctgttgtcccagctactcaggaggctgaggcaggagaattgtttgaacccaggaggtggaggctgcagtgagctgtgatcgtgccactgcattccagcctaggcgacagtgagactctgcctcaaaagaatagaaaattaaaaaaaaaaaggaaaatctatttgaaaccaaaaggctaatgtgttttatgattcaaccctcgcaactcagtgtgaaaaaggcaggaaaggtttactgtgcctccatttaacagatgactaaactgaggcccagagagatgcagtaacttgcccatggtccaggaatttgatctcctgaccctgctgccttggcttcactaggggtggggggaagagacaggaagtggaggtggtggtgggggagtccatcccaccagatctggggaggggcatggggaataaggagtactcaccttgggccctgggggtccctttgggccctggaacaagagaagagaaggtgttaaatgtcatactggaggctgctcctgggcctgtccttcttagcatcctggctttgtaaaaggtgacaccaatcccagagagcaggaggctgggctgccgtcagaagcaggctggagctgcccaccctgggcctgactcctcaagcctgggacagcttctgcattagggctcaggtggtggcaagtggaccgcagcctccgcacaggaatgtggagctactggaatccccctggctggtgcctcacccagccatttccccagggtggctggaggggcaggtgcacaggggtccacacacatgcagacacgtacatgcagaggcgcgcgcacacacataaacatgtgcgcgtgaccctgctgtcggcgtgtgtgggaaaggggcttccaggtctgggaaccatgatcctagcagcccaggcctctggaatgccctggatactgaccatctcgccgtcttgtccgggctctcctttggggccctgcggaagtgtgaggggacagcagtgaaggatgcaggatgtcacattgaactgagcccaaatctcaggccagaccccgggctggggctctaagtacattatcttatctcattctcgccaaacctgaagagcgagtatcactgtccccactccacagatgagaatgttaggctggggaagccactggcccggtgtgacaagtaatggatgagccaactgagcagctgtcctgggggaatctggcagcagtttggtggggatccatttgactggggggggaccctggtggcagtctggtggtggcatgggctccacaatgaagggaaggacaggctggggattctgggttagggaaaggggtagtaggatggggcctggcctctagactttggagaccctgggaggaaagctgaggctgagatactattggggagcatgaggggaggggctgataaaggtctgcagagacagtgtccccagaagggtctcaggctcagggttgagtcaggattgggactgggattgcaactaaggtcagcttagggtctctgggtctgtttgaagttagagttgggttgggagtcagggtcagagtctgtaaggttcagagttagggtctgaattgggggcgtagaccaggatttgggaatgagttagaggtcaaggtcttgattgggatcagagacccagttagtgttagatttaaggttcgaatgggattaagggtctgggttgaagttagggttgggtttgggtctggggtcagggtcaggatctgaattggggctggatcttggttggagttaagtttgggcccaggttcagtgtctggattagggttaaggatagtgtggggtctgcactagagatggggatggggatggggctggctctggaatcaggatttggggttttggtcaagtcctgcgtggcccaactccatgccctctcttaccgctgggccttgtgctcccctggggccatctttcccagtgtcgccaggagggccccgggccccaggaggtccagggggccccggaggcccagcagctccatcttgtccttggtctccctgaaagagatggggcttggcatgactctgagggggagggggtccagcctccagagagaggctccctcagatgggcagccccacgccatccccttccccagcccttgggcaggctcaaaggggagggctttgttattgggcctcttgccacttattgggagctgcatgaaggaacaggtccccataccttggtgtaagaggccctacaggaccctttacatgccaaggaatgtgccagctctccagcgcctgaagcccagatccagtgtttaggagagagatggcacacgctgcatgtgggagacagcacgtgtgtccagctgccccctcttctttctagaacggggtctgagtgtctcctgaaggaccttcctggttggtcaactcccacttcatttaagtatggaggggcactcttgggcatttatccttgttcacagctgctttattagtaacagccccaaactggaaactaatccgaaagtcctttggtaggtggaaggttaaggagctggggtacatccacatcatggaacacaactcagcaatcaacccaaaggaacagggcacgacacatgcaacacctcagatgcatctcaggagaattatgctaagtggaaaaagtccatctccaaagcttaatactgtgtggctgtatctacgtaacactcttgaaatggcaacattgaagagatggagagcccataatggttgccaggcgttagggatggggggatgaaggtgattgtaactacaaaagaacagcatgagggacctttgtgggcttacacaaatcgacgggtgtgttaaaattgcacagaacacacaaacgagtgtgtgtacaggtgggggcatctgaataaggttggtggattgtatcattgtcaatttcctgttgtgagactgtactacagagatgcaagatgtcaccattgggggagactggatgaagggtacacaggtgttattcactacaattacatgtaaatctacaattatctcaaaataaaagtaaaaaaaaaaaaaaggatgatgaagggccacatggtttctctcatgcagcagtaaatccccaactttagaacctgatgttagtactggggtcagacctcaggcagccggagccccacctcatggcccaacccgagaggaagggagatcactgtgactggcacctacccactgccccagcagtgcccaccctacactcgcacagggcagagccacaggaatggagtacacccaggtcatggtgccagtggctcccaaccctcttgtaacaaagaaaggaagacctagcactgagctagcaaggatatcctgaagatgtttttttgtttgtttttttgagacagagtcttttgctctgtcgctcaggctggagtgcagtggcgcaatcttggctcactgcaacctccacctcccgggttcaagcgattctcctgcctcagcctcccgagtaggtgggattattattattattactattatttgtatttttagtacagacggggtttcaccatgttggccaggctggtttcgaactcctgacctcaactgatctgcctgccttggcctcccaaagtgctgggattacaggcgtgagccactgcaccccgctgaagatgatcttattcaacctttgtgatgagccggccagttcactgttattgtcccattttacagaaggaatggctggggtgggggattatttgcccagggttacagagccagggaaggcagaggctcctctcactgccaaggcacatggtccctttgagacacttcttttcatccacagatgttccctgatctgatatagctcacctctctagcaaactgcacttaacacaaattcacttgctttcccaattaaaaaatcagcagaagttctcaacacccaccactcaggtcctccccttggtctggcagggccagggtcctgatcaaaatattacagctccagcggaaaggaaagaaaactgacagtttggttaggtcaccaggtatgggtggtgatggtggcgggtgattcctgttttaatttgcactgaagcaggaagaatttgaagacacccccttagctccctgctgctccttttataaagggcctcaggctgggaactactggcctagactctacttattaaggcagaaaatgggcctgacactggagcagatcctgggagaggttcttaggctctttcctggccagcctgcctgctcctccctcagggattggatggctgaggtctaaccctgcaaacgtggggtgagttgggggtaacacagcaagccatcaggtccagacccccactcagccagtctaccttgaggatccggcgattgtacaggtgatggtctctacttataaagcccggattgagccgtgggaaaaccatctagtcagcagataggttgtgtggtcagaaaggcaggaaggtgatctgaagaactacaaggctttttgaaacctggaggcaaagccacttaaccaagcccagagaaaggcagttaggtgatcaggtgtgcagactccttctccaaggatggctgcttaccagctgagcgcccaccagcatccacgccacctgcggccatgtgacggtgccatcacccagggctcccggcctggctgcctgcaacctcccaagagagcctaacccttacccaggggccatgagagataatggcaattggagtcttaagccactactttttaaatttttttttttggagacagtctcgctctgtcacccaggctgcagtgctgtggtgccatctcgtctcactgcaacctctgcctcctgggttcaagcaattctcttgcctcagcctctcgagtagctgggaccacaggcgcacacctccacacccggctaatttttgtatttttagtagagatggggtttcaccatgttggtcaggctggtctcaaactcctgacctcaagtgatccacctgcctcgacctcccaaagtgctaggattacaggcatgagccacctcgcccggccattaagccactaaactttgtgtgtgcatgtgtgtgtgtgcgcatatgtgtgtgtgtgttggggggtggtgttcccgatgactgggacactgggaccatagggagggtatccacgaggagggttgggggattgggaggagatccactcttcatgacctctgggcctcaggacttctagtctgttgaagagagggcatccccttttggaatatcagctccacacacccaccaggaaagcaagcagaaggatttttctcagcagctaaaactcagcatgagcgccctttctttgactgcagaacaatctcaccagctttatgtggctggcacagagcagctgtgttcgtgctcacagctcaggggcttggcctggccagcccccttccctgctcctgctcacagctcagggccgcggaggtgcggagcaggcgcccggccagctctgaccacaagctgcagccccgctctccgcactgcggctcccactaccttttctttcccataacaacctcttggggtgggggctgttcccccattcacagttgaagaaactgagtctcagagagcaaagtgacttgttcagggtcactcagctggcaggtggcagagctgagctttgagctcagttctgctgaccccagagccttccctctttttggggtgccagctgtcctcaggacgctgtctccagtctggggtcacgtgccagccccactgtccagcatccacagtggtaagcatggagacctggccgtcttccagagacactccacctgcgcaagaggggcagccccacaacccaggtccctgggggcttccaccggtgctatgggtggggaagagccctcttggcctctttctgtgatgagctgcggggagctgggacccagaagcagcgccagttatgcctcattattacacaaaacaaaccatgtgggcagtgagggaggtcatgcctggttcttacccgggggccaaagtctcctggtgcaccctgggaacaaaagacagggagaggcatcaccactgctttcatcgtttcttcacatttcccgtcgggcatctgtgcccagtgcttcatagacatggtatgacttaattccaacaaaaatagcaggcaggccctatttttatttccatttccaacgaggaagcagacacagtgaggccacttaacctgctcaaggtcacacagctagcagatccaggacttgaaggcaggtaggtgtccccttatctagggggcagccccagccattcgaggccccagacattgtggagcagagacagcccctcccactgtgtcctctggaagggacggtaatgagtaaatgttgctttacacggccaagttttggggcagtgcattaagcagcaatagacaccaagacaccagttctctctggtttcaaagcccctgatggaatcacttctatgacacggtggcatcagccaaggccggcaggaaggtaatcaggacacctgccaactgcactagtctcttcattgacaagaacattgagaccatgacctcatgcaatctctcctgtggctccgtgagattggtcttaatttacagatggggaaactgaggcccacacagcccggcaacttggccaaggtcacacagttggtggtggagctggaatgcaaagccgagcttctgaacaccagctcccatgcctccccacggctcccgcagccctggtggttgggcgggaaccctgcctgcctggcctgagctgcggaatcacagcagggcccatctgcagatctcacttcccatttccaaattctgggtcgggggtggacatggtccagctgtgggagcacccggctggccctggcacacctaggcctactctggtccctcccctgattttaccgtgggtaacacaggtctcttctgtccctttctgagacacttggtccctgttttctagggggctttagtgcctgataccaaggaagccttcctcccaaggggccgcagagatagctgtccgccttgtcttcctgatgggtgtcctccccacagagaataccattaacagtcatggttcaatccccaagccctcctggcaccccccttcaccatgaagtcctctggacactcgtcattctgggaacaccgggcctccgagtttggttatgctttggtcccaggagaactcaagactcaactctctgggcaggccgtattgtcaaatgtaagccttgtaatcattttagaaggtaggcactgtgattcccactctacagatggggaaactgaggctctaggaggggctgtgatgtgctcaagggcacactggaactggcgttcggaggcaggtttctgggattcttcgcctgcctaccacatctgcacagcctctggcatcacttaccttttcccctttcgggcctggaagtccctggaaaaggaaagtggagaaagaacagacctgagtgaggggcctaggctggctccccttctggcttccctatacctctgagggcagaagggcccgtgatgctgggcggctgagtggaaaattacacatgagctctcagccctcaatgagagctgccctggctggcccaaggaagctccacatctcagtcctcagcatgagggatacgggggaattgcgggtgaccagcaagggcccactggcatcctcgcagcagagaaaggggcacatgcactggccactcctcccagagagcacacacggtcagttccctactgctcagcacccgccctgtcattgtcagtgggagaccactgcccccaagccatctttctggaatctgagaagcaggcagtagacagagattctctctccataggcattctcttcttctttttcctttcttatttcttaaaaaaaaaaaagcattctcttctttaatggtagcagctccttggagtatgggttccatctgtccatccctgtatgagtcatccatccatccatccatccatccatccatccatccatccatgtatccatccatccatccacccacccacccatccacccacccatctatccatccatccacccacccatccatccaaccatccatccacccgtccatccacccacccacccatccacccatccacccatccatccacccatccacccacccatccacccacccatccacccatccacccatccacccacccatccacccacccatctatccacccatccatcatccatccatccatccatccacccacccactcatccatcaatccatccatccatccatccatccatccatccattcatccacccatccactcaccaatccattcatccatccatccacccattcatccactatccatccatccacccattcccccaccaatccatccatccatccatccacccacctacccatccactatccatccaaccacccaccaatccatccatccatctatccagtcagcatccatccatccatccatccatccatctatatatctaccgactcacccatccatccatccacctcaaattacttatttaattgtgcttatgtctccctgcatgttttgctcatctgctgaggctcctggcccagatgttgagaactcagcttgatgcccaccagggcagtcttgagaacgtagtgaggacactgtgcctgtgcctgctgggaggtgctcgcatgctttgagggctgactagaccccagggactgtgccgtccacagttttccataggtccacccctcctatgagagaggggttcatgtgcccacttgacagacaagaagcctcaggcttgggaggttaaggaggcctcccttggtcaccgtcagcaggtagtggagttagatttgaactcaagtctgacacccaaaaggcttctctctgtgctgaaccaagttccagtggctgcttccctccagtgcctgctggtcactcctagccccacggtggcagccccagcccaggaccccctggaattgccctgtcatcacttacgggcttgccatccaaacccaggggtccctggaaaacgagagagagagaacacaggttacacacggggatgacacttcctccatgtcttatgacccaggtgcactattcagtgacaagaaaacaaagcctgtgggagccccgcgtctgggttcagtccatgtggcctggggctgagggaggggaaggcatctgtgtgttgtctgctgcccagaatcccctcctctgacaagagagcccagttcttctctaaagaccaccccccatctcaacccatggggtctgggtgggctgctggggtgggcatgtgaccgcattccctccgccagggtgacggggtcagcgatgagcctgggatccaaggcgagccatgagcatcttgcctgggacttaatggtggggctttagaggctttcttctgatggggctaagcctggagctcccagggaccaccacatggcttgagaataagccaacagggaggaaagcagagctgagagacagagagaaagacagcgtcgagggcctgaagctgaaactacccctgcacacatcagtttgagagctaatcaatacttttgttttgccttcactaagccagcttgaattgagctcctgtcatttgtaactggcagagtcttgaaggctctttgagcttcccacattgctgcagcctttgcagacaacagtaaagctggagagaagccgaatcacaccagggtgggtccagagagtgggggcactcagggacctccaggccccctgcagagtctgcagagggccagctgcacagcagcccgtgccagacaccccttcccctgtccacctaccactcactcaacaaagcctcgcctagctcccctccgtgtgggagtggggaggaatccagctggcagggatgctgggaccagggctgcctggtctctgtcagccccctcttcctccccaccactgtcccctcacccccacatacacttcactcttggccgcagcaacgatgcacacagctccacacttctgaacctttgcacacactgtccacctgccgggcacatccttcccttctttgtccatcttcagctcagttacctcctcttccaggaagccttctagggttttctccttcccagagtcaggccatctgtccctgttcccaccacatatattctgtcgcatgtgacatgacctgttgttaatgtagggtctgcacaactcttcccctgtagagtcaggaaaagggtctaatccctgtgcctctggtattggatggggcctggcaggcagcatgtgcccagaaaatgtgtgcgaagtcaaaccaaggaagtatggcaagaacgataatgctgcaaatgcacgcactgcacagtagaaagggaaggcggagaggtggagaggtagaggctctgccagctcctagccggcagggcgcattgtggcgacagtaacgttggggtatttggacctaacaagtgtgtgtgtgggggcggggagggccctgtaagcaaaagagagcagcctggccaaggcgggatgggggaccctgtaggtggtggaggagcagaggggctgcactaacctcagtgcctctcataggcccctgaccggtggccttcacgcagccttcgctcaggctgtccctgcctctctgggcttccgctggctgaggacggactcccaggcccagcatcagggtcctctgtggttagggccagcttcagccatttggtcactctgcacccctgtccgtcccgagctctctggcttcctttccatcctcatccctcggctctctgttccctctgcctggagtgccttccctgcgtttccagctggtaagaggcagctcgtcccccgggacagcctcctgctctgggaagactttcctggcctctggttctggacacagctgggagctggcctcgtgcctgccaggtaggaggtaagctgctggcttccctggctcaacctccagactgcctcgtatggagatggcccatctgcccattcccagacggtgtgagagtggccactccacgtggggctcgcggccagggccttgctggcagcaggaaaccaggcagttctaaaaattggtgtcaaagggcttctggccaccagtctcatggtcgctgagggtttggccatcagagtgatggcctggtgacagctggggtcccaggagagtgggagtgggggcattccaaagtcttggggattcaggccctgggggccccgggtcagggcctcagcctccatcacaggcatagttctagtccttgccatgagcctcccaggagctgccctagctggacagtgtcctcttgccagttcccggctgtcctgatcctggggtccacacccccaggccttctgccctcggtagtacactaaatttggccctgccccttgtccccctaccccccgacccaagccctgctgggtgtcctcaaggtcgcgtcccactaggcatccccaccttggacccttcccccaggcctgaccccacacacatggccgccagtccttcctgggtctcttcaaggagctcttcgtggcccccactcagtctcagtcacacagcaaccctgtaaggtacgtgtcatcatccccatcttacggagaaggaaactgaggcccagtgaggggaagaccttgcctagggccatgcagctggagaggtctgggccctgggtctccatcctgtctgcactgcaggcccgtgccgcggtgctgtctggcctcccggccgctctctcctgctctaggcctcggaaacctctgttaaatcctccctgcaaccaaggccccctggatgtgaagcacgcagagccacagggctctgcctttctagaagtgcccgtggaagggagcccaggctgtccccttggcctcaaccccagagggagcatctcagtgctgccggctgtttctggaagtgtccaccgactggaccttattatggctgcaggcctcctgcctcctgagctggacgctgccctctgtcaagctaggactgttcctggggggtcactgatggcgcagcctttggtccccgaggcttctttctgatgtgtgagaagccccgtccgtgacagaaaaccaatttttacaccaaacgccctgcctgtatttgtgatcagagagctctgggagtttttacaagtgaattcagtgtgtagcttcccaatagaggcagagggtgcagtgtgcgcagtgctcccgggagcccccaccaagggctgaagggaagtcaagtccaattctcggaagccgagcctgtgcctgcaccggcactgaagctccctgtgtgaaaactgacacagcagacggggctgggccagcccctgggacagagccgacccacagccaggatgacacctgggcaagaaagctgtccccaggcccccgagctttctgtgtggggcagtggctgaccttggagaagctgctgggtgggtatggtcactgaggaggggactccgaggtgggccgggaaggaacagcctggctttggagtcagatgcacctacctggcttggggatgtgattctgacctcccctcctgtcctggggaagttgggccagccctctgggccggaggaccctgggctgtgaacctccaggggatggaccctgcccacagttaccctacagaatgcctttcccaaactggtgtcccacagcacactgccctgcagggtgccaacaggcttgcctggagacagggattccacggttgagtaagtctgagaaacactgggttacactctgcggaacaggtttctttcctgcagggctgtctgagccgtcattttagtttgtgggtctttgaaaggacagtgctccttccacccctgcaatgggctcagtggactcagcctcaatgcactcagtgcctggctgagtcacgcaaagcaactgaggcgtgaggctgtgcagaccatctacaaaccaggtgtttctactggtggagtgggggctgagcctggctctgggtgctcttgagaggaggacaagcgcctcagggaagggcctggggctggtctgaatggagccaaggaatgcatggggtggggggcgtggtcaggctggacagaggcatggcagggcaagtgtccaagtgtctaagcccgagggaagtccttctgaggagaatgagggctgttctgagcagctgggcggtctggaagggcagagccccagactgggcgggggcatgccttgggtggtggttggctgggtgtggggggggtctcccctatctaggcagccctcccctgccccagacaatagggcaccggccatcagctgccccgttcctctcccagcatctcccacagaaggagtgggaaggaaagtagctcggggaggtttaccaccagctcacagagcgaaggccagggctcagccttgcagggcccaggttcaaatccctcctctgagcctcagcttcctcatctatggatgccacagcactgtgcctggagatgctcatgactgtccagctcgctcccctgcctgatcaaagcccttgaatccaccagaggttttcaacgccttctgccctctgagaaaccccacagctgtttacaagccttggttctgctttaaatcactctttccccatggagatcagccgggctccgggatgtttccggatgtgtgagaaacaaacaaagctctgggctgcacatgagcagcaggccaggcggccacctgtcctgggaccccggatgggcagccctcccccagccctggtgctgcctcagtcccttgctttgctcagggactggggtgtccccgagcctcagtttcctcatttgtgaaatgcaggtcatgccattctcctctcaaacaacaagttcaaattgggtcccaggtcagtggcctttgtttcccagaccaatgcaagatgcgaagccccacgggcaagcagacactggattagggtttgccctggccctgggggacagtgctgggagcgacccgtgtgtggccttccaagaggccggcagcaggaccctggacggtgccgccagctctgccacctgtgaagctgaggctttgctctctccctccctcggcctgtcgcgtatttcctaagccgggttcacagagccatcttttgaggcatattaacaagtgttgaaaccagccctataaacgttataaagttaattagggaagaagggagggggaggaacaaaaataaaccaagcttgtggcacactcagcatcatcatgaggtcagcgtgctccctgaccccttctcggaactgttttcctgctgcctcagaatcgcgcaggttctcttacagggtcatggttccccttaactgctccgtagataccaatctgaacgtaaaaaactaccttttccctactctttcagagcctgcacaccagtgaaactacaaagtcagctggtcggaaggatcccacgggagctgattcaccggagtgcggtctccacatcctgctgatttcagccccccggtcctgaccgatcaatgaccccaattttccagcccctcaccctccatgatccccttaaacaccctggcccagaactccttggggggatggatttgagggtctcctccatctccttgctgggtgccctgcaatcattaaactctttctctgcagcaaaccctgctgtctcagtgtaattggcctggtactaacgcagcgggcatttgaaactggtggtcctataaccgtgtggctacagaggggaggtttcctggtgaagtacattcgggatgtggagtatggtggctccatccctggagtgtcttgatgctcatctgccgggaaaagcctgtgctgctcttcttgctctatgttagggaaaggtccagggctggccctgtcctcctgactgcggcccagcactccccaagatcggctccagcatctgctgaactgaaccaaacaaataaactggccgcgtttagaagcagacaggagtaaacgctcaaatcggccagagctgggggcctgtcttgctttctggctgtaattaatgctgacggttcctgtgagggaacggagccctcaaaatgcactaggacaaggcccctggaagaagggcttaccaggattatcaggccaggacctagtaattacaccccagatgttgacaattcatcaaattacaaggctggtggggcctgaggtcccagcctgggaagtgcacattcctgtgtgaaggttccctgagcctcctcccagctctcattagagccggctggtggataaggggtgggtgggcagcccccttcagggcgggtcagcaccatacggttctgatttctcagcctaggctctttgtacacacatgggctgcagcaagactgtccggggcttagcaatttcccaaactcaaattctttgtgctagggaaaggaagaaaagaccctcaaagttaggttcagcccagctgttgctggtgccttgagggtggcacaatgttcctcctggagcacttcttcctgggacctagggcattttgtagagtgggctctgtagtgacctatgcacctcaactcagcaaactgtaggagcttcagctgggtggggtcccaagcgcttgcaccaaggtcagagacttgcccctcatgtgctccttggccttgcttgggctgctgccctctgtgctgctcatctgtagtgtgaggggctggaattgggcaatgtctttctgggagccaggttttatttgatccgtgcagttaaaagaacccagactgggcataacggctcatgcccgtaatcccagcactttggaaggtcaatgtaggaggattaccctggctcaggagtttaagaccagcctgggcaacatagtgagacctcatctctaaaaaaaaaaaaaaaaaaggttgggtgtggtggcacatgcctgtagctcccgctactcaggaggctgaggcaggaggattgcttaaaccgtggaggttgaggctgcagtgagctatgatggcaccactacactccggcctgggtgacagagcgagactttgtctcaaacaaacaaaaaaacaaagaaccccaaaccaaatgaattagtcacatttaaaaattgcaaccttttacataaacgtccagagtttgggcttttcttgaaaagccgggagatctcgcagaccctggtccacaggctccacccttccctgtggtctcacgcctagcctgctgcccatggcgaggtgactcgccagctctgcagggcatctgatttgtaacccttggcctagaaagtctcccagggccctttcagctctatgatgctgtgaggctgtgaaaccggctggcttctattttggggagaggacctgctcggtgatgcctgagtgtgctggaagtaattacatgtatgtccatgtcacacatcatggctagcagaggtggtgtttacagcactgtgcctttgaaccgatcccaaaaatacctgctgaaatgacacatttgcccatgactggtggggagagacatgattaccctgtcaggtatcagaaaatactgttcctcattaaggtggcagagaggaaagagcttgacccccgtggggtgagggaggatggaggatgggaccggcgggccgggatgtgtctgactgagctgcccaggtcaccagctcaggcacagagggctgttctggtggaaggaagtctgggggaacacaccatcagctcattttggtgccagccgtggatggggtggaaatccagagtagggagcagcagctgacgggaagtgtgaccttcacagaagggtgaccgccacagcgtggccaaactccacgaggcagtctagagggagacagcgtgaccaggacagctcgcagcacacactgaagctgcagtcactctgcctcgccctgtggcccctggaccatgcccaggccaagctctgccctcctgccccacccttggggcatggttggtttcccagcctccctgagagctgccccctaggctgtggggtgggccctccttggtttccacagacaattgtcacccactggtaaagaactggttgaaacccttaaaaatgcaaaggatttttatagaatttggatttccagcttctctggaaatgttggaagatgtggtagtgatgactgcatgtgcggaactgcaccccgatggggcgggtgccccgattcaccccaggccctgccgttttctctgctctcctgcgcccaaccagcctcatctattttctcacttgccggcggctgcaagcgtcagtgagcccgtgagcctgcaattctagctcaggtccatctctccagtcctcccaccctcctgggccagcctccgccaggccccctacctcctgccccacatacccatccttcctgcacagtgaaggagcagggtacatcctgatgatgaggtcctgccccgtagacctgggagtgagctgctgaatttccctggagcgcgtttcctcctctgcaaactgagtgtgttgcggatggaatggctccctggatctgggctcacagcaggcagcaggggaagggtgggttaatgagagcagctgtgacgcgctgggccagccctggggtaaatgaagccagggaacagagtggagctgaagcaatgtgggcccttccctccctatctagatgtcactggccctgaccacagaccggccaggcagaagcctcatcatccccatttcacagatgaagatctggagctcggagaggccaggacaccagcccaaagctttgctcgagccctgtgccctgcctgctgactgcccctcctctggctgctgtagcacctggcacaccctcacccactgccctcagggcaaagctgtacccctggcctggcattcaaggacaacctcttcctcctgagcgcctccttccagactcacgtgtcacctcttctgaggagccttcttcagctcccgcccccgccagtttctcacttatggactcactgctctgtcttcctgccacctctcctcccacagtgaccagccacatggctccagtgcccaccacagatgcccttcctgaccggaggatgtgcagccttggctcgcacacccctggtgatgtggaactcactgctccccgggcagactgaggggtttgcaaagattttgtttaagcctggtccttctcaggctagaccctccaccttgcagcgcctggttcaattgtgcccagaacctccacgtggctgggaagacgaggcctcaggttccagcccagggagggctctcagcttgggtgggtggggctgtgggcccctttgtccagccacccggggtggaactccagagtggacaagagatggccaattcctcaaggctgggtgctccagggacacaggcttctcacctccccctacgcccttaccatcccggcccatcttgggtgcaccctctctggatgttccccctgaaactccccacttatcagcatcctcttcaccttctgacttcgactcacacctcccttcctcaaggcggtgcccctgacccccaccaggccaggtctgggtaacgggagccccgcctcctagccctggccacgaggcatagtgaagctggaatttgtgggagttttttgttctgtctgccactcaaccacaggctccaagtggggagggacccctggatgtgtttcctgctaccgtatcccaaatgccgaagcgcctcgtacataacgagaacacagtaaatacccgctgaatggatcaacaacggtgaagggaacgattctctgaatgaacgtccatcctgctggctctcgtgcccggccagggaacactagagggcgcgcttgacctgccgaaggctgcctccagccctggcggactcttgcgctggactcccgccctcgggccacagcctgggcgatcagccaggacgctggccattgaggatgcaggcccaaaaggggcgccttcagcctcacaggcttccctggctggcattggtaatggacagagcagtgggaacggtccctgaacccagtccgtgtgcccaactctgaagctctcctgcgtcatctccttggttcccccaatagctgaaggggccgaggcttggcggggccagggacgtgcctgaggccacatggactatagacccctgggcccattctgtctccactgcatgggctggacatcgtgccagccctgggtcctggtcgggggcagcttcataccaaaatcactgctttctctttagtctatttgcttcgaagacctgggcttggctcggtgactttgtgcaggtctgtgaacatgttcttccatgtgatggggcgaggatgctgtggggctggtctgttgcctggggaagtgggaggcggttccagccagtgaccacgctgcaaacatatcacaggcaaaacagcaaagcgcaggaccaaccccctctgctgggccccctacactgctgtccctgctaagtctcctcccagagctaggtgtggacaggaggtacctgggctgctgccaggaggatgcaaaaaactgcagcagatacaggaggcatctgggagccgagggcggagcagcagctcgggccccactgacctggggtggccgcctcctgtgaatgggctgccccacatgggacactcacggggacactggggacacagtgctggaccaagacaagaggctggactcaagagacttagggccctggggagaacggccagcatggtggccctggttgcatctccctgaggttccagtctgcgtgccattatcagggactccggagtcggctttcatccggtctcagcttcactagaatctggggattgtggggtggcactgtaggggtcagacggaaatgagatggaggatgttgaaatctaaaaacagatgaatttgggatatttcagataaatcgtttaactgattacatttttataatcaaagctgtttttgaactacaagagtgcaagagagcgtgtgaacgtgcggtgctccatgggcctttcttgttcacttgattaattccaaaccgtccatccgagtccttcatttcaaaattggtcccaggccgaggccccgtctcacagaccacatttcagcccagagctctcgcagtcccctggggccccggctgtcgctgctcccaggactgaggccggagatgaagtgcagtcaccgctccctcgactccagaggggcttgggcacggcgctccggggcccaggaggtgccgtgcgtgtggttttgggtgtgctcagagctgacctgtgacgcctgccagccctcgtttctgttagtcattcaggcttcaccagcaaattagtgcaaccgcctcctacccgcaccccttcctccagtttctgccctgtagccaaggaggccttttctactttttaataattaattgattgatttaaaattttattttttaaaacagacggggattcggccaggattggcagctcatgcctgtaatcctagcactttgggaggccgaggtggtcagattgcctgagctcaggagtttgagaccagcctgtgcaacatggcaaaaccctgtgtctattaaaaacacaaaaaaatcagccaggcgtggtggtgcgtacctgtaatcctagctacttgggaggctgaggcacgagaatcacttgaacccaggaggcgaaggttacagtgagccgagatcatgccactgcactccagcctgggcgacagagcaagacactgtctccaaaaaaaaaaaaaaaagatggggttttgccatattgcccaggctgagcatgccctgctccgttcagctgctcctctgcagggacaccctgcacagtgatacagaactggacatttcattaccaggggaagatttagaaattcttcctaatttctaataacggctatgacacggaggtatgaatgaggaataggagaggaggtgaaatgaagaaatggacttttaagtttaagttagacttagtttttgtttttcttttttcgtaaagcaggaaagcatcctaacactttgataccaggggtggaatacaatagttgggaagggagcagcagggctggatacagacaggtatgagcaggagaaaccaaacatcctctccaagtatgtgtttctgggggtggtctgagaagcactctcctgccaataagcagcccatcctggccccggccctgctactgtagacagcttgagaggctggctggttggtgtgagggagtagggtcacatagcctgggtgctaatccaggctttggcatgcaagcaggccgtgtgtctcagctaagtcctgtcaccctctgagctcagatttctcatctgtcaggtagggttgaaaccactagcctcccatggtgagacggcatgcatgagtgcgcacccagcaagcactcaatacttgcacctgcttccctggcacattggaagggctttgggagatgaagggtgacagtcttttcttctctgttcccaaaggaagcaccatgagtgggggatctccaaccccttggcagtctatctctggggacaagtgatttttcttttttcttttttttttgagacatggtctcgctctgctctgtcacccaggttggagtgcagtggcgtaatcttggctcactgcaacctctgcctcctgggttcaagtgattctcctgcctcagcctcccaagtagctgggactacaggcatgtaccaccacacctggctagtttttgtatttttatttttattttttttggtagagacagggtttcaccgtattggccaggctgatcttgaactcctgacctcaagtgatccatccgccttggcctccaaaagtgctgggattacaggcgtgagccaccgcgcccggccgggacaagtgatttctataaacacagagtcaagttccatcccccagccctcgcctctgtcttggttctacttggtgcagctctgggagcttctttggcttcacttcctatcgtttcctgtcacctgctcactcactcctgccacactgaccttgagtgtacctgaacacacaaagcttgctccaacttcatgacctgtgcacttgctttttcctctgccgggatctcccccaagatctctgcagctttttcatcatttaaatctcacttcaatgttactttcctcaagaaccttctgattatttaatccaaattatacctgtccattcacccagccaacactctcatcacatccttgttttattctcttgtaagtacattaaatgatatcgaagaaatgtttaaatagctttctgaatgtgtaaaacaaaccagaaagtcactaaagcttaatgttaagagttaagacaatcaaactaccaaagaagaggaaaagcaaacattgtgacattgtaaataggagatgatgagaaagtctaatgttttctgtgtaagtcaaagttcaggcaagattaagccctgcatgagtgacaggtggtttcatcttagtcagatgccacagtttagagaggaaaaagcgctcatgataaacaagatacctccgggaagatgacattgagcttctaattattcattcctctctatcccagggcaaactcccattcccatatggttctctaaagactgtgactgggcctgatccatctttgtgccaccccagtgcccaggccagggtatgacacccaccagatttgttgaacacagccaagcctcctatttctgagatgggcaaatcactttatccacataaatactgattactaccccaaaatgcaagagtgccgtgcctagggctcctctgaaggctcaacttttgatccacaatgttctgagttaggaattatccctatgctgttgattctatgatgtcttccgtccctggaccagttgggatccaaaagctcttaaacacgggtgatttcctctttaaactctatgcctgcaattccaacctttaccacgaggtgacaggattacacaaaccttatcaaaactagtttaatctctgactagttctaattaaaatatgccctaaattaaaacaatattcatacatatatgtatatattttaaaacttatattggcatagctttaaaagtgtaatacccacagttggccagcatttggggaaatagacagcatttattcattgttggtgggaatgtaaattagtacagtctcctggagggcaatttggcaatacacatcaaaagccttacacatgtgcaaaccctttggtgcagcaattccacttttagtcatttattctaaggagataatcatggaaataagctatatttattcccaggatgttgactgtaagggtgaaaaattgtcaatataaataatttaactttgagactaaataaatgatatatcggatcaaatacaatgtagccattacattctctaaggatttttaatgatgcagaaaagtctcatgctatatttagtgaaaaaaatagtacaaaaaagtatgtccaatgtaattgtattttagattatgagactgacgtgctgcccactgcactaagaaggcacttgtaattctatttttaaagcaataaatataaaagcaaacttggatataagaaatactagaaccaccaccaagataagaggacttatctgtgagtggcagaattagagatgctttttccttgtgtttttctccattgtccaaatgttttacaataaacatgctttttgttgtaatcagaagaggctgttaatgcatcctcgggagcagagaggacaggccagcctctgtacacggagggcatggacagggcgagccgggcccttgtcggctctgacttcctcaagtccacaacctgccccacagatgtgggtggcccctatgccccgtgtcctccagccactcctatcaggtccacacatggacctggtttcagctgaggcagctggcctgagttaatccagaaaagcaccgacagtctccaccaccagagtctcctgccagactctatccttgctcttagaaagtgataagatattggcacaaagagaaaaaagtaagtcctccctgaggctggtcctgaagtttactaagctacaaaaaaacacaaaaaacaaacaaacaaaacaaaaaaccaaaaaatgctttttctaaaaccgaccattctcaaaggtgtttttctttccaaatattgcaaatttatactgagtaggttagaatgatttctgaaacccatcttttcttctattgagactgtcaacgatgaggaaagacagtgatatttatagaagggctgccacacacaggactggaaatggcctctgtgtctcacactcagttaaccccgctctgcaggtgtgatctccccaggcccaagtagcctgcccaagtccacacaggtgactgactcaaagccacggtgatcctctgcacatgaggggcctccgaggtggcccaggcccttcagcacgaggcagtcaccccagcctctgggatgaccacatggagccatctgcaaatataccccaggctgagagccgggcagagccctcctgtcctccacaggccaagagataggaatttccactcaggactgggccccaggagcctgcgaaaggtcctccccttcctcgaatggggaagctgagcggggtgtctgccccaccctgtgggtctcacggaaggagtggcccaggtggtggtgtgagaacgaggggtctggaggcacacagctggtcttgctcctggtgctggcgacgtgaacgccctgaatccagcccacccagggaagacgcctacctccgtgtggaaatgggggtctgtgtgtaagctggggctgggcgacctcaggaagaaggccatcatgggctgtgataccagcttcctggagacgttgacagggtgccctcatccctcaccaggcccagcctgctcaggcctcccagtgactggggagctgctggtaggaccaggggcacggctgccagagctgcctacacagaggaagtgggggggcttgctggaccccagctctcttccttccaagaaagctcccagtgtcaagcctgagggacgcccgcggggctccacacacatccttctctccgttcccagccccgacagtcacagcgccccttctccaggccaggcccaggtgtgagggagcccgataccacccccacactcagcttcgtctttaattcccgacagtcctgtcatggccccagggacagcagccccgggtttggcctggctcgcgttctgggtgctctaagccaaggggctttcctttccccaggcttcacagcgagtgagctgcagagatgagagccacgcccagctactccatccgcacccagcctcctgcctgtcggccacagggccagctgccggcacccaactgggtcctgggaggaaggagtgagggagaagaggcctctgtgggacgcagaccctggcacctgctctggtgtggctgagaacaagccccctgcccctcccccggggcagcaggcagcatcctctccgatgctcgaggctggtggggaacggaccggaccgctgggtcactttgctcagaggaaacaatggagaagagggggaggaaaccactcatctacaccccaccctctcccctctggacctgtgaatacagagtaacccggggtgaagggaactgcgtcatgccaggagtggttctgttagtctccggtcctcccgagccggtactggtacagcgaataatgccaagatgcggggctgaactttccagcgaaagcctgtgcttccccaagatgctggacgcccaaaggtccgggctgccgtgtgcaggagacgggagcctgacccttgcctaatcagaagagcagctggggactgcggcagggccctaaccccaggtgtgccatgggatgagggtgggtcccagctggttttcacatttcattcttacttccgcagagtctgagaggccaggctgctcattgctgggggagctgcccggactgcctgggagatcccaaacttgactcagcccagcacggggccactccagcatgaagtcaatgttccccagagttaccaccaagtcctggagggctgggtttgtgacacatcatgtgccttcatctctgcattcacagagcaggaaattgaagctcagcgaaggtgagcaccttctcttaaggtcactcagccgagaggaagcagagtggaccccacgtcaagtctccctggtgctggggctggcctcctctcctccgctgcaggaccggggaccaccgctctctatcaccagccgtcctgactgcacagatctgtcccgaatcagccagcatttccctccctgcatcttcctgccctggaggcacaaaatgaatctgcccctcccctgacggccctgccaatctcttctgctgctgggctccccctactctttctgacatcccaggacctccggatgctgctgccacgaccctcaacccccgcacaggacctgacagcggcacagccacgctgcgtcttgctgctgacgtggtgctcacttggccggggctaggacatctatcccaggaatgcgctagcttttgggttaattttaagagatctgccaagggatgacaccacagccaaactggaaccagccagtctcctgttatcgagtgatgacgaggagcggtggctgggacagggagtcctctgcccactgggaagaggcccagccctccagtggagcacgccacagtgcgggggctggactgttggctcttggctggacttactgaagaagcagtggcaggtggattcagtgccacccagacacctgctcgaggtgctctgccttgcctccagggcagccctggagatctgtgcagcctttacctccccagagctcacgctaatcgcctccacagaaagaccacggctgctgaggagcagaagagacaggagcgcagacagagttaaatcaaggctcagggaaagaatattggtttaagagaaaagggtgaagagagcaaaaaaataaatgacaaattaccgggtagccatctcgtcctgattgcccctgtggtaattaatatgtcattaataatcagagtttcggcagaaaccatatggcaacacttagagctcaatcagggcccagacccacacccgccccccgacagctggttggtgacttcctctgcagcgggaggactcaagggctccaggggtcttgggggcagagcagccctttcctgcctcagagggccaggctggagggaccaagagcctcagggcttcatcggggctccgggcacagtcacatgtgtgccctccccacgctggccaggcatagggtaaatgccacgtggggacgtggggttctggagggtgcagccacaaccacacgaccaaccaggaactgaaaatgctccttaaactaggcctggaagagagcctgtttcctctcagttgccactgggatggggtgaaccaagaaagagagccttagaagccaggaatatcggggggcgttcactgtggctgcatgcttctctgccccctagttccagaccctggagcagtgaccaccctgcctgtgttccacacttgggcacccatctcccaggtcagacccttccaggttgcagcttgagaatttctgcatttgtttaattcatttactattttaactgccaagttaaaaaagaaacaaaaaaaacactctatagcccccggcgttaggtacttcagcaagttcacacacgctagcctccctgagacagccaggaagaactcagctgccaaacatcgcttgaagccaataaatcaacacaatcctgctgtcttgcttggctcacggtggggctgcatgcaccgagaagcccagattccgaagggcactgatcgggaaaccaatcatggtacacggaagtaaaaaataaaagggctcatctgaaaggaattccttgagaaggctgattttggctctgactgtcaatgtgcttcttgagtggattaactgggatttaccgggctctgaaaaactgacagcatgaatcaaaggcaggcacatcctttgccctggagaatgaatgggatttctaggaccacttgcaatcccctgcattcaaacctgcctctggccggccaggagaagttcaagggagctgcccagtgcttccctcatacccttcacacccctcacaaatgcagtgacattttcctcctgctccagtgccatgccctcaccagccaggtgtgctcacaaggtctcagctgtctgatccacattctggcaaagaagaaaaatgaaccccagggtctagtggtcaagcccgactaattcctgggacaactgcccgactctacagctctttctgccaaagcacgggacactgaagcatttagaaacgtcaactgtcacggagcattttaaagctacggacatggtgctagcatttccgtgtaccaaggtgagcccaagatttggtgaggaacaaccaggcttgtgcgctggctctcttgctaggaaaatggtcacagaacgttccggcgaacaggtcaagcctgtggaattctgtgcctgcattcatctacaaattaaaatataacatgactcctgtatgactgattttttccccccaaacacatgagtttttgtttttgtgtttgagacggggtctcattctgtctgctgcccaggctggagtgcagtggtgcgatctcgactcactgcaacctctgcctcctgggttcaagcaatttttcgtgcctcgatttcctgagtagctggggttacaggcacccgccaccacgcctggctattttttgtatttttagtagagacgaggtctcactatgttggccaggctggtctcaaacttctgatctcaagtgatctgtccaccttggcctcccaaagtgctgggattccaggcgtgagccaccgcacctggccactttttaataggactgatgttttctgaggacacacctccctaaccaaaattatgttcatggaattgcaacagagagagaaccaaacatcttatctttcagaagcagacagcacagtccaggacacttactggaggacctgcaaaacacaagcagagaagccacagtcagtgtggaaggcagagtcccctcgcctgtcctcagcacggtcccctcacctgtcctcagcacggctcctggccacctctccccggaaggctttgatgctgccatggctgtttcctgccacggcctgaagctgggggcagagcagaaggagcacctttgcccttggaggggccgggatggtcacgggggtggtggtgacagttcccacatgcatgggtgcatgcattcatgtcaccaggcagctttgggttctggcactgagtaggaattggaacatgttcctacttaaaggacaagctctggtgctcctgaggggatggtttatttctattgagggcagactgggggagcaaacattttggacagagagaatactgggaggaatggcaaatgggtgtggctgaacaggctttttgggggagggggctcctgctgcccagctccagggttagaaatgcatgaggagtagcagggcctggggctgcagctgaggcttgtctaccagatgagggctcacagagaacccttatgaggcccacaggggcttcacctcacagcttgtgaagcatgttgcatactcgttattgcatttgaccttcccaaccatcttttgtgagaggtctgatgaacatctccactggacagctgataacgcagaggctcacagagcagcgacttgtgtggggccacatcgttgattatggtggagtgagcgcatgctggatggaaggaggtctcccaactctaccacccctaggctctgtgcactaagccacgcggctgccaaaccagaccccgaacctcactcgagaatgaggccacacggggaggcagcacccggcagtcagcggccagcacgatttatacgtcccaagtatgagccaggagccatgggggtaactaacgggaccagtagtgagtgcaagaggcaagagccctggctcatgaatgttgactgagcagacagatccttaagaggacattacacaaggagaaggccaggaagctccatgcatagcacaagggccctgacccaggctgggccgagtccagagggtgagaaaagaggagggaggagtgttgcagagatggacaagctcagaacatgccaagatcacgggcttttgaggatccaggagaagtgaaggctgctgcagcagcgggagggccggagaaggcagggccagccaagcccgggggtttgtttccatgtaatggtctggggggcttggttctaagggtgaaggggagtcagcgaagggctctgcaaggaggagcgatggggaggggcaagagtgcacctggagatgcgctgaggtgtccccatgcaggtgctggtgggtgaggggggagtggagagagtcagaagatgttggtcaggggagagatggggctcgcacagtagcgatgcatagaggaaggagagagatgacaaggatttttggcttgaaacactgatgtactcacaccccagaatgatgacatgggggacagtgctttccccaagtctagatcagggcggaacagagcaagatgctggcagcttggacatcccattgagctgactcctcactgtcagccaatgaccttgattcctattttccaaagcaaacaaaagctgccggataggttcgccatcgcctttccaacaccagttgtatacatctgtgcctgtacctgtgcctggacctgcacctcagcctgtgcctgcatctgtacctcccccgtgcctgcgcctgcatctgcaactatgcctatacctgtacctgcctttccacctgcccctcctcctcgatctgttcctgcaccagcacttgcgcctgtgcccgcacctgcccctgcacctgccctcctctccatgccttcaggttaactcggaagaactgacccaccttcaattaggccactgtcccctctgtattgcccagagcctggccccatctacggtccctctggatcttagtcacacttgccctctcatgcaagtcctgcccaacagctctgaaacatgctctaattcctcggctggcaaagccatcccttgatcacacaccccgttctattcctgcccttcctctgctctctccctcacagcaagaaacagtgggaggtggctttagaggggcaatgtggggcaattgggtagggccttgagcagagagagggtgagacctggctcatattttaaagatccccgtgtggggtagcaggggtagaacctggaggctactgcatgctgcaggggagagaggacagtggctcacagctggtggtggcagtggaagtggtggacgtggttgggttctggattgattctgacagcacagccaagaggatctccctagttttggcttcagcaactgaaaggatggggctgccgtcaacagaggtggggagatagtagtggggcaggcttggctgaaggggtcagaagcttggcacacgtggcactgctgcaagttaaagagaagatcaagaagtcctggaagcaaagtagagaaagtgtctcaggagggagtgatcgcctgtgcacaggacgaagtaactgccctgctgatgggtcaagtaagaagaccaggaactggatgtagcaatgcagaggcatgtccagggagtgacaggaggggggtctgatgggagagggtttcagagagaagggggttgagggatgtggacagtgggtgctttggaggagctctgctgcaaaggggaggaaatgaacagttgctttgtgggagtggggcctggagatggatatgggtatttctttaggatgagagacatggccacatgtttgtaggatgagagtggtccagcagagagagaggattcggtgtgggggaggaggggagagtcctagagccacattcttgaggaggtgagaagggctggctcttggcgctggcacagatgggggcctggacagtccatctgtggagatggcaggaggaagagtgcctggtgctgctaggcatgtgccatggaggtgggagttcgggcaagttctcttctgattgtgccaactctctcagtgaagcaggaagcgaggccgtcagcctcaggtgatgatgctgcaggaggtgttcggggactgagcgggagaggctgagtgggttggacaatgtggcctcagccaggcagcagaaagggccacgggggctgggggtgtttctctccagctgggtaatctgcacgcactggagtggagcatgtggaggggactgggttcagtctggggtggggcttttgctgagtaagaatgagggaggagggaggggcagggaggtctggcatggggaagctggcaggattccagctggaggggtgaggggcaaggggctgggatccatggatctgaaggctggagatggaagggttgtgggggtcaggaagagggaatgggctggaatttgtgaactgagaatttgtggatgctgcatttatatcgggcaagacctctggagggacaggctgttgtcagaggaggccaagtctatcagaggagaggaggccacggagtccagaggccaggctgtgtaaggggcttctacgtggctatcaagattcacaggaattcacccagaagtactgtgggagagagggctggtgacccaggggctggaaccgactagcaatgaggtgggtgcacgtgggatcagagatggcttctagaatgacaccccatcaccaccccagtctcccattctggggccagggtcatagttctcaaaatgcagatctgatcctgacacttccctcctcactgtcttgttcctaagacaatggcccgaacccagtggtgccttccacgtggtgatctgcctccccaaatcactaccgagctccctccccaaatcactaccgagctccctccccaaatcactaccgagctccctcccaaatcactacccagctccctccccaaatcactaccgagctccctccccaaatcactaccgagctccctccccaaatcactaccgaactccctccccaaatcactaccgagctccctcccaaatcactacccagctccctccccaaatcactaccgagctccctccccaaatcactaccgagctccctccccaaatcactaccgagctccctccccaaatcactaccgagctccttccccagtgccccacacctgagcctctggaaacagtaaggagagatgtgttataaccactagttatcacaaaaaaatgaaattggatccctgcctcagcatcaaccaggatgaattccaaaaggatcaatgattttacatgttaagaaaaccataaaaatcctagaagaaaatgtgggaacattcctttctagcctgggagagggcaggcttttccacctatggttcataatccagaagccataaaagagaggtctgatccaaccacataaacccaaaaaatgtctgcaaggcaaaaagtctcggaagcaaagtcaaaggccaacctaggccgtgtgcggtggctcacgcctataatcccagcactttgggaggccgaggcaggcggatcacttgaggtcaggagtttgagatcagcctggccaacatggtgaaaccctgtctttattaaaaatacaacaaaacaaaacaaaacaaaacaaaaaacaaaaaactaaaaaaccaattagccgggtgtgctggcgtgtgcttgtgatcccagttacttgggaggctgaggcaggacaattgcttgaacctgggaggcagaggttgcagtgggccgagatcacaccactgcaccccggcctcggtgacagagtgagactctggctcaaaaacaaagccaacctacgaaacatctatctaactcatgtcacaaaggctagatatcttgacatacaaacattcctacaagacatctctcaaaacatcagcaacctagtagaaacaagatatccaaagatatgaatgaagagatcacagaacagaaaatacaaatagccctgaaatatctggattatgaacgaggattaacttttgtagctataagtgctaatcttcattcataataaaagaaatgaaggttaaaattacaatcatatcagatcaaaaaaatgaaaaaaatctcatgacctactgtgtgaagggcaatgaggacagtcacctcacacactggtgagaggataaattggaaccttctctctagagagtgatctggcaatactaagatttaaaatgtatgtgccaattgccacagcaattatcctcctagaaatgtattctgcagctatgttaacacatatgtaaaaggatgtggtgtaaaaacagtcctcatcacagaagtgttgagatagtaaaagtattagaaatggcacagatggaactgattaaatagaggatggtgcagctgcagatggaatactatgcagccatgaaaaaggtaatgttctgtaagttctgatatggaactatctccagggtgtattgctgcattttaaaagggtatagaatggcatgtagtaaaaatgatctgtagacttttgtttgtataaacaggacatctctaggtgtgggtgcaaggaagtggtcatcagggttgcttctgagtaggggggccaaatggccagagggcaggagcagcagggagactgacctctcaccctgggctctttcacaccattggatatttgtgtatagctcactgagtcaaaagcgtcaacacacttgaacttgacagtggctggagaaagctctgtgtctttgctcctcccagcttttgctgcctttcctcacactcatgtccaagctgcctccagggaagctcaggctgggattattattctgagagcctgaggtcctgagagcagagccctggggactggcgtgaagtgcagcccagatgagacgaaggaggggctgtaagagtcaacatcgctccctcactgagcactcctcgtgcaccggcagctccactgaatgcgttccccagagcatttcatgtaacccctgctgcaacctcactaggtgcattttacagatgaggaaactgaggcccagaaaggctaccatgcccagggtcatgtcctcttctgacctggggcagagagaggtgagatacgcacttcacgacccccgcggatcccacgcaggggctgctgggaaggcactttcgtccgtgggaggacccaggccccctttcttggccacgccgtttttttttcctaccacagaaagagcggtaatgtgtactgagcttccccagaggtccccgggagggtgtgtggtgtgtctgaatcacccggctggtgaggcggtagtccagccagaggcagtcccgtaggaccctaaacccatggcaccatccatggtctccagaggggtggcagagtgggaatggcagcgttccggagactgatctcgttgctcgtgggacagtccacctcaagctcatctacaagactttaaaacacactgcccaccacttctcttgggccctactggcaccatgtcaccaggctaccattgcttcatgccagcaccagcgtcacagcctcctaatccgactcctcctcctgggcacccaactccaccagccagaggggcgtttacaaaatgcccaacccctttccagggcttcccacggcacacggaatgaaatcccaactcctggcccagccttcctgcatggcccagtccttgccagtctccaatgcccttgggcacggtgctctgctccatccttccctctcagttccccaagctgccagctcccttcagccttagacattcacattggctgtgttcctgcagccggcatggcatggctccactgccactgccttggacaaaccttccacgactgtgacatccaaagatgtcaaagacaaggctgggcatggtggctcaggcctgtaatcccagcactttgggaggccgaggcgggtggatcacctgaggtcaggagttagagaccagcttggccaacatggcaaaaacccatctatactaaaacaattattagctgggtgtggtggtgggcatctgtaatcccagctactcaggaggctgaggcagaagaatcgcttgaacctgggaggcagatgttgcagtgagccaatatcaggccactgcactccagcctgggcaacagagtaagactccgtctcaaaaaaacaaacaaaaaacagagatgtcaaagacaaagatgtctcctcacccttcccccattggtttctatcatctttccctggttatttccttccatgcactgttgcaatcggtagtggttatttacttgtgggtcggggactgtttctgtcagcccccggaaaggcacttccctaagagggaccatatccctgggaccacatctgcccagttcattgtctccttgctgcccagattggagctgggtaggcacaagcacttaagtcagcatgtgctgaatggatgagggctgaagagggcaagagcacctggaggccgtcacatcttcggagccctctgcacttgacttcttgtactaggtttgtgctgtggctgccacagcctctggagatggactgtacggcctgcagcaagctgggcatccaacagtgatggatgtgacagaggggttggtccacgccagccaggggttcctgcttagaaagcgagctggctgcagggcttccaggtgaccatatggtggtgtcccgaggtccagcccttctgcgcacggccttcaaacatgtgttccaagcataggatggttccactgactttgctgtcaggaatgtgggagcaattcagtaaaagccagatgacctgggaaatacgtgaaagcatctgatgaagtagagggtttgatgattctggggcctcttaggctgaatggatgtggcccaagagagttcctcaaactgggaaccttgcccattcacacctcggggttaggagcaggtgggcaagctgcttgttgtgttaccaggtaagcagaggtgcgtggtgatcttgagagtccccgatgcccaccttaagctcttagcctctctgggaacaatcatgtctccagtgtttcccaaagggtgtgtccagccttcctgaaatgcaaatggggaggagtctttcccatagcctggcaggggccaggcctacacaccaggaggtgagggctggcttcagtggcctgaggctgccagggtcactgtccctgctcacagccccacacctgctcctctctgttgcccctggactcccaacttcccctctgcctgtgacttgctctccctggtcctgattgagcctctcttcctctcccattcagccagctcaggtaagatgctgcaccctggctcccagctctcagaagcatgaacccatccccagaataaagacaacaaccttcagggacttttccctaaaggagcagaatgggccaggctagtctcgaactcctgacctcaagcgatttgcccgccttggcctcccaaagtgctgggattacaaagtgagccactgtgcctagcctgagtcagttttttaaaataaagaaaacttgtggatttcatcaaatgctttatctgcatttactgagacgatcatgtggttttatctcttattcaataatatgatgtactgcattgattgattttggatattaaaccaacattgaatttttgggttaaatcccacttggtttataatccttttgctggattcctttgcttgtattgttgaggacttttatgtctgtgttcataaaagacattggtctatagtttctttttttgtgatgtctttgtctagttttggtatcagagataatcttgcttcagaatgagttgagaagtgttctcgccatttctattttttaaagggtttgtgaaagattgttattaattcttctttaagtgtttgttagaattcatcagtgaagccatccgattctgggcttttctttgtaagaagttttttgatcactgattgaatctttctctttgttacaggtctattcagatttttgacttcttgaatcagttttggcagttgtgtctttctaggaatgtgtccatttcacctatgttatctaatttgtaggcatacaattgttactagtgtttccttttaatccttttcatttttttaaggttgctagtgatgtaccttcctttcagccctgattttggtaatttgagactccagtgtttttcttggtcagtctagttaaaggtttgtcagttttgttgatctcctcaaagaatcaacttttggttttgttgattttctctactgtttttctattttccatttcatttctttctaccctgattttatgatttttttttcttttgcttgctttgggttaagtttgctcttatttttctagtttcttttattttttaatttttatttcatatttatttatttacttatttatttgagactgagactggctctgtcacccaggctggagtgcagtggcacgatctcggctcactgcaacctctgcctcctgggttcaagcgattctcctgcctcagcctcccgagtagctgggattacaggcgcccaccaccacacccagctaatttttgtattattagtagagagggggtttcaccatgttgaccaggttggtctagaactcctgacctcagatgatccgcccgccttggcctcccaaagtgctgggattgcaggcataagccaccgtgcctggctactctccttcaatttttttcttttttttttgagacggagtctcgctctgttgcccaggctggagtgcagtggtgagatcttggctcactgcaacctccgctcctccaggtttaagcaattctctgcctcagcctctggagtagctgggattacaggcgtgtgcatgccaccatgcccggctaattttttgtatttttttttttcagtagagaccatcttggccgggctggtcttgaactcctgaccttgtgatccacccgcctcagcctcccaaaatgctgggattacaggcatgagccactgcacccggcctcaattttcaaagatagttttgccaggtatagatttctttgttgatagtttttttccttttgtcatttattgaatatgccatcctactgccgtttggctttcatggtttctgatgagaaaccagttgttaatattattgagcatcccttttctgtgatatgctatttctctcatgatgctttcaagattcttttttttttttgagacagagtctcactgtgttgtccaggctggagtgcagtggcatgatcttggctcactgtaatctctgcctcccaggtccgagagattcaagcaactctcgtgcctcagcctcctgagtagctgggactataggcacgcctggctagcttttgtatttatttatttattttttttagtagagatgggatttcaccatgttggccaggctggtcttgaattcctgacctcatgtgatcctcctgccttggcctcccaaagtgctgggattacaggcgtgagccaccatgcctggccaagattcattttttttgcttttagcaatgcaactatgatgtgcttaggtatgtatctctttgagtttatcatccttggagtttgttgagcttcttagatgtgtagattaatggttttcttcaaaattgagaagatttggccatttttttcaaatattcctttgtttctttctctcctctgcttctgggactaccattatgtgtatgttgggacactcgatagtgtctttgaggctctgttcattttccttcattcttttctccttctgttccttaggctggatgatatcaattgacctatgtgcaagtttgctgattctttcttctgtcggcccaaatctactgtcgaagccctctactgaatttttcatttcagttatggtactttgcacctccagaatttttatttggttctttaaaaaatacttttgatctgtttattgatattctccatttagagggacatgattctcatgctttcctttatttcttcaaacatggtttcctttagttttttgaacatatttataataaccaatactacatctctagcaagtacatctgggtttcctcagggatagtttctattgactgtactttttccttttttactgccctactttcctgtcttctaattttttgctaaaaattggacatctaaactaatctaatgtggctactctggaaatcagatccctcttctcctttccaggatttgttgttgttgctgtttattgttgttgctctccgttgagggcctttcctggactaattctttaaagtgtgtcttttttgtcatgtgcagctactgacttctctgcttgtttagcttagtggtcaggttagacagagatttccttgaatgccttgatccaacgtctcccactctgtgctggcgggctgtgtgtgctggagcacagcttcaatccacctctgtgtgcgccggagcacggcttcaatgctgcacctgtgtgtgcgccggagcacagcttcaatgctgcacctcgcacagcacagcttcaatccacctctgtgtgcgccgcagcacagcttcaattcacctctgtgtgcgccgaagcacagcttcaatgctgcacctctgtgtgcgccggagcacagcctcaatccacctctgtgtgtgccggagcacagcttcaatccacctctgtgtgtgctggagcacggcttcaatgctgcacctctgtgtgtgccgctctgtgtgtgccggagcacggcttcaatgctgcacctctgtgtgcgccggagcacggcttcaatccacctgtgtgtgcgccggagcacagcttcaatgctgcacctctgtgtgtgctggagcacagcttcaatccacctctgtgtgcgccggagcacagcgtcaatccacctctgtgtgcgccggagcacggcttcaatccacctctgtgtgcgccggagcacggcttcaatccacctctgtgtgcgccggagcacggcttcaatccacctgtgtgtgcgccggagcacggcttcaatccacctgtgtgtgcgccggagcacggcttcaatccacctgtgtgtgcgccggagcacggcttcaatccacctctgtgtgtgccggagcacggcttcaatgctgcacctctgtgtgtgctggagcacggcttcgatgctccaccacattacaactctgcctttgtcttcatttcctgcttgaacaatctcaaggtcagccagaggtgagagactggggctccaagacaggtttttaatggacatgtacatagctgatgtgccttccagataccctagaataagctggagcttttcaaagctcctttgaacatctcattccctatatttttattgtaagttttcaagtcatccactggtgttatcacctcaagcagcttcaatgttcaacaattgctgctgattatttttgttaagcatcctggggacagggctctttgttctaagcaagctgtgcataggtcacttaaagacaagccttgggtatggtgcttttccatggagctgccagacaagtcaaatagtgacagttctctggggatgagcatttgcaagcttcaaacctgttctgcttcctccaagtggctgctagttttcacaaacaagtactgtggttgtgacactgctgtttgtttgtttgttttttcctgacagagtctagctctgttgcccaggctggagtgcagtggtgcagtctcagctcactgcaacctctgcctcctgggttcaagcgattcttgtgcctcaacctctgagtagctgggactacaggtatgcaccaccatgcctggctaatttttgtatttttagtagagatggggtttcaccatgttggccaggctggtctcaaactcctggcctcaagcaatctacctgcctcggcctcccaaagtgctgggattacatgtgtgtgccatgcatggtttttaaagctggtttttaaggctaccatgagcttgagagaggagaaaattaaaatgctacaaatcttactgttcttgttaagagcaaaattcagatatttcctgaataaacatttcttgggctgtggcaaaacttctgttcatttccagagttctgaaaaggtccatcttcccccttgtttttgctcctttatggagaagatctttagaagtcctcattccgccattccagaagtgcttcttccactggatttttagaaagagtttcttgggatcagggcagataaaagactctagcacagacactgttgcccgaaggctagcagctgcggagacccgggaagtgcctccgtttgtctctgtaggtttgtgtaggcactggccaagcagtcttctgtgatcttcatttgcccacaagtgcctctttctctctcccttctctcctccttcccatcaataagcatttatggaccatctcctgagtgggggcctaacctgccctgaggagcccatgctttggtggagaagcaggacaactctgcagaccaggccaacacctcaggtgtgggaagcgctgagatggagggaggtgtccagggctgcgagagaaggggagagtgatggacactcttggggataagagggtctgggaggagagaggatcctccaaagcccttagaaagaaagatgactccagagtgcaggcacagttctgggattctccagctaagaagccagccaggggaaggtgggaaatccatcccatttcagatagagacatagaaacactgcaggactgtggagctcctgctgggaactagggaggctactgcactgaaggcaggcaggatcaccctatctgcaggcctgcagcggcctcagggaggaatcccagccgggcactgccctacctggcaaaaaagagcctttctctgtgggcgcggtggctcacgcctacaatcccagagctttgggaggccaaggcgggcggatcacttgaggccaggtgttcaagaccagcctggccaacgtggtgaaatcccccgtctctattaaaaatacaaaaattagctgggcgtggtgacgcgtgcctgtaatccagctactgaggtggctgagacatgagaatcgcttgaatctgggaagcagaggctgctgtgagctgagattgtgccactgcactccagcctgagtgacagagcgactgtctcaaaaaaaaaaaaaaaaaaaaaaaaaaaaggctttctcccaagagacacaggaaaaaggcctccggcctccttatacaagggaaggcatgaaagccaggatgtgcatatgtgtgtaactatctagaaataaactcaaggcccagacaaggcccatcagagaggcacgtctgttctgtgtagctcactttgtttttggataggcagacaatcgggacaccacactggaaaaacaatgagggggagggatcctgcccaccccttggccagcagctggcctctggcaaggtactgtaccccttggagcctcagtttcctcatcagcaagtgggtataataacatattcttatcttgcagtgtctgaggatcgcatgagataaaggacttgaaagagcccagcacggggccacggacccagtgagtctatctttccttgactttgaggttgttttaaacttgagtcataagttaaatggattttggagtaagctgaataatatcatactttgtcctaaaaaaatgactctgtgttcctcatctccttccaaaaagcatgtcaggaacttataataaaaggcaataaaaccctttacgagggtagaaaataagagctgagtaataaagtgtgtatttggcagggtctcgggtgattacacacagaagccaggctaaaggaagctccagccattgaactcaaaacaggcttcagcttccagaagtcaaggcagagagagaaatgaagggtgcttcttgccggtgagcgctaaggagtgtatctggagggtctctgcgtaaggaactcgacactgcaaaccagtggaacaaggaggcagaaagcctgcgcccagctccagggagaagagtctgaggcctggagaaaacgtgccactgcctccccttgggcccagttggcccggggtcctcttggtggtgagccagcctggcttcgtcaccatggccaccttgtgaagttgcttaggggctgggcattcattcgttcgctgttctgtgcatttacatgcctgggggctgcccgtgctgagtgtggggcgatacctcttggacaaaaccattagaggtttttttggaggagatgcttgagctaggcttgaaggacaaagggtaatgatcttggggtgggagtccaggtagaggaggagatgttctgggtgcgggaagacataagagtgaaggctcagaaggtggagagccctggacatccatggtgaggctggaggtggggacatggcgtggggggtgatgagagctgcaggaggtcacggcagtgagaagagagaagaggacatgggtccgagacatggagaaggaggctcatggggacttggcgtgggcagggaagggatcgaggatgcagccaggtgtctacacagggaagcaggtggctagatgcctcctccctgtgacggggaagcccagggaagaaagctgggggagatgctggcttcggcagggcaacgtccaacctcggggacccggaggagaggatgtggctggaggcagggagaggacatggtcagtgtcacagcagtgggagactgtgggagagaggagaggagacgaccaagggagattcattcacggggcaggtgggtcccgtgagaatggcaaaggagcccgggtcacagatgagggaggaagcgcagggaggaagcgcagcccagacagccgggactgcccagcatgggggagtggccaagggtgggggtcaagaaagagaaagacagcaaagcatccagtgtggccatcagaggtcagcatgactttagctaagacgatgtcagaggggcttagggaagtccctgggcgaagggggcaatctgctggggactgggtagggggagttctgggtgaagcagagacagcaggaaggaagggtggtgaatacaggtgcctctgtgggctgcagggaagggaggtgggggagtctcctcctggcggctctgccaaggaaggacaggccacgtctggggagggatgaaacccacaggagaacccggttgtgctgaaggacccatgggggagggtgtggctggcggagtcatcaccttctgcctcagagagagggggctgctctggagtgggggactaggggccaacaacgaggttcgggggatgactgggggcagaggggacagtcctggaattgtgaatgccaagaagccccggaaaggcagtactgggtgctgcggcctcaggaaacggcagctggacttggaagggggaggagcacctgcccaggaccaaggcatgactcagggtgggcagcaggtggccaggccctgcagtcagagcctggggccatggtggcttccaagccttggcttaggagctgagaaaacctgggactcaccagggtcgcctcttctcccaggcttgccgcgccgtccagggggccctagacaggaaaacaagaatgcattcattgagaagggaagccagtggacttggctgcgtggggcatgccccagccacccacctgtccgctcgcaacagctttctgggagtggcctgcccgagggggtctgctggctgtggagggggagatgcgtggggagaaaccccttccttctgccactacctcgcctgttccgccaacccccctccccaggtggccgcatccctcatgccccacgcacccattctgtcattcaatcatcggctcactcagtcattcctaagccctcccctaatcacaaagattcccatgggaggctcctgaggcagatgcgtttgcagctgagaaacttcagacttaggaggaaagtaagggtgggttatcttaggaaagccctgacaaacgctgcttcatattcactaaagtaaaacaacaaagccaacacaacaaagaggccatcacggccgcgcagcgccgaaatccactcatgacaggcactacacgatccgcctgcagtctccgccactcgctggggcctccagctcctccttccccagagccagggagctgctcagccgccttctgggcttcctgtccacgtctgtcctccatccgcgcgctataagcccttctgaatttacggtgcagaaccccctacctccgcctctggccctctgcccacatcagaccctgagaccagagtaacctcagcgctgaaggagacgctttgactctggccgtgggagcagaggtctgaggcctccctctccctcccctcacctctgtggcgctcactgccatccttcctggcgccccttctcgcccctgtttcagtgaagttgggtgcaggtacaagattgcaatgtgtaaatggcatttgatacgtcttgctcacccactgtatgccaggatctgggctgggcctggaggcgacagtgggacaggttgtgaccctatgacaaggcactgccctttcctgcaaaagccaacctcaaaccccgtcaagaatttccagaacaaccacgaaggagatgcaggagactggccccgatcgcgtctgtggcaggatggaaaaatgagtgtgggtgtctgtgtgtgtctgtttgcatgtgtctgtgtgtgtctctatgtatgtgtgtttgtgtgcatgtgtgtgtctgtgtttttgtgtctgtgtttctgtgtgtgtgtctgtgtatgtatgtttgtgtctgtgtgtcctgtgggaggtgcttctcgacttttgttaagggaaggggaggagggagggccagtctctgagaaacagcgagagagaagagatcccttcaggtggagaggggccctcagtgctacacgacacgtcaaaagatttgcaggcccaggggtgaggcgagaatgaatttcttgccagcctcagggacaggggacttgaggtgaggattgttaaacaaaacttaaaaatgaaaaacatgttacttcttgctcccctgagttttaagggcaaaagtgcatgccagggacgtagcccttggttttctcccatcctggacacagaccctgaatttggggtttatgctggaattgccaggggctgtgttgagctggtgaggctaggactctgggaccctcagaacagacaacagctcctcatactgtgtgggtttacagcttatgaggcacctccaggcccatgctcctggccgaggcctgcgacacccacactgtccggccaattaccttcctatctccacgtgcttgtcccaccagcatctcagaccagttgtggcccaaacacctgccttggtctcctccccagtgccctgtgcggggctgatggtgcctgggaacctccagagccagtcacaccggatgactggccctggttattaactaagccccaggtttggggggcaggtcagcactctcggggggggctttcctcctctctgggcctgttttcaatgagagcgaggtacgggaacgggagccccccggcacacgcagcaccatgttcctcgggctgtaggaggaagaaggcccagtggccacccacaaagcttcggggctcttgccaggcctcaggttgtgctcggcccagcgaagcagtaggccccgggccccaggcagagtgagggggcatggcaggaaaggggccaggaatgggggaagtagccagactctgctagatccgaagcaatgcagcactgtgctttcctgatgggaatcactgggtacgactaggaagttctccgtctgggtaactgaagccagatgaagacatctgcctgtgttggggcagctgaactaacggatttgtctggtggctctcctgggtggcatggttaggcagaggctgatggggagggatgctggcagggtgggcagctgcccaggcagggtagggtgcctgcctcccagggtcactgggcgatgccccctgcaggcctggagctgggcaggactggggtgttgctgagcatacagggcctgtgagccgcaggccaggcaggctggatgtgaccccgactgaatagggccctcgtggagggagagaatgaagctggtcatgcacactcctgagggctgatcctaaccaggcacggtgctgggggcgccatgtgaccgacttgcagatggacaagcggtctaccctttattctgagctctgtacctaaatgtccaactccactgggaggcaccacttccaaactcaagctcacctcccgacttcccacgcgccccctgcctcccttgttacttacctgcaggtcccagcagcacccaagcagtcaagccagagacccccccccgggcatcatcctgccccagcccccaacctggaccccttccttctcagcatcaggcgaacgctgcccctgcactcagtcccccactctgccactcgctctgctgtgctcgattctccctcctggcacaaaggacctcctgcagtatgtactctgcatctcaggcagctctgtgtccccaactcccactgcaggacacgaccaagtgatgtgtgttcaggggaggaagggcgggggggagagggagggagggagaaggggacaggcagggaggcctcaggtctcctcactgcttctgggattctcctgaaaagactgcaagtccagcaagctccagggcttaggagagacacagggccacctggtctgatgtgacgtgccagtgagatagggagtgccttccacccttcctttcccggactgcgagaagacaggcggtgaggccctgggagagggcgagtgtgccggagctgcactccctgctgactgtgggctcccactccactgcttccaccaacagagaggccaggcgggcttggagactggattgcaggagccgcaggagtgggggcaggacggacggcctctcctgagtctctggactatcaggtgccgagagcccaccatgggcagtgacctgggttcaacatctactgggtgccaagccggctgctcacccagtgagcatgaacttgggacccttttcctccaggactccctgtgcccgccccgcaggctcaccttctgcctcgccagtcctctgaagaaggtgctagtgttccctgcacagatgagaactctggggctaagccaggtgaaggggcccacctaaggctgtgttgctagagcctcctggagcccttcatagtctgtggctcccaagtgcaaggacagttgtgtcccatatgctgagctaccgggcaggcggccttggcgaccagggaggctgttcctctggggatgtggtccctttgctggggctggctgtgccccagggcatctgggcctggtgtggagcaggttgccccggcccctgggagagcagggccagcttggctgcagctaagacctggctccaacaagcaaaaccaggcctttggccaggtggttggcctcagagtttttgcttgtttcttgtttttcttctttctacaagcagaagaacctttcctgctgctgcctgagactcagacactcaggaaggcactgggagtctgtcttgattgatctgctcatgtggagaaggggaaactgaggctgcaagggataggacaggtcttgcccacggatgctgctggaaaacttgtcccagctagagggtctagcgctgaagaccaccttgggctgggagaaggccactgtcccccactctgcatgggacccacacggctctgagctaggggctggctgctggggaacgacagtatttcaccgtgggtgccaccacagtggcatctgcaaaacttcttttcagaggctggggcgaggggtatgccagagcaggaggggaagaacctgactggtggggaagctgtgtcttctgagcaacttactcaacctcattgaaccttagagtttccaactcgggaggatagaggtttgggagtggtggcaactagacttgccttgcggaatcatgaaccagatgagctggcagcagacacaccagcctggggtacaaaaggggtgcttctttgggaccccaagaaataactggctgcaggggcctctgggccatcacaatgcggggctttaatgtaagtgggttctttcctctgtgtgtgtgtgtgtgtgtgtgcgcgtgtgtgtgtgtgtgtgtgtgtaatgcggggctttaatgtaagtgggttctttcgtgtgtgtgtgtgtgtcagggtctcactctgtcacccaggctggagtggcgtgatcacagttcactgcagcttcacacgtctgggctcaagtgatcatcccaccatggcctcccaaagcgttgggattataggcctgagccactgtgtaactgttttttgttttgttttgttttgttttttttttgagacggagtctcactctgttgcccaggctggagtgcagtggcgtgatctcggctcaccgcaacctccgcctcccaggttcaagcgactcctctgcctcagcctcccgagctgctgggaccacaggcacgcgccaccatgcctggctaatttttgtatttttagtagagaccgagtttcaccatgttggccaggctggtctcgaactcctgacctcaggtgatccacctgcctcggcctcccaaagtgctgggattacaggtgtgggctaccgcgcccggcctgcgtaactggttcttatgagtccccaggtgggtgaagctggagacacagtgactgcacctcagcaacactgcaggcaggttcgaggtgctgagacgccgacggagcccttgactgcactttgagcaaagtgcaagggcagccccgtgggaagccgggagctttcccgtgtccctaatcactgcctgtctgtgaacctctggatgagaatgcagaggctgagctctttgggaatgaggtttctcaatgaaatttcagggtgccaggtctagcacaggccagccagggctccagctcgttgcccaatgactctggacgtctgagagcagcatcagcacagtaaacaactccagggaggcctacggctttctcagcactgttggaggccagacaaaaggaaaccatttctaactcataaaaatctcatctctggttggggtggagaactcacgccgctgatcaactccaaaggggggcctcgaaccccaacaggcttcctctgaggcctgagctgcaaggatttggctctctaagtggctccccccgcccagccctcccggcacctccctccccaaggacgtcccctctagcaatgcccgtcttatcaaggtcccttcacaaacctgcagccaccccacctcagccgcactggggacagcctgcccaggcctctccctctcaccctactggcctggctgcttcctgtgggctcctgactggttgctccgccctcagcccaaccctgatcctcccttcagccagcccctgaggacagggggttcatggaatccacacaacagtctgtgaagtgctttcatttctctctactcttttcttcctatagatcaggggaactgagccccacagaagtcaagaattactaccaggcgcaacagccaaaaggtggaagcaacccaaacgtccacggacagaagaatgagcaaacagaacgtgcactgatacagcgggacgtgagtcagccctggagaggaaggagttcctgcgcacgctgcagcatgatgggcctggaggacgtcacgcgatgggaagtaagccagacacagaaagacaaatacggaaggattccacttctggaggctcctgcagtcgccagattcacaggggcagaaggtggaatagggggtgccatcggtgggctgggctaggggaggcgagactgggaagtcggtgggcccagagactccgttttgcaacatgaagagttctggagagggatggtggtggtgacgggtgcgtgacaatgtgaacatactgaatgccactcaagtgtacacttaaggatggttaagacgggaaatgttatggtatgtgtattttatcacaattaaagaaaacaaaacaaacaccccaggggtctcagctacccctgagcgaggctgtgagccgggccgtcctgatggagactgtggggatgctgctggcagccacagcagtgtcccgtgtgaggagcccggcactgtggagtcacagaggatggcatccccaaggtcacacagtggagaaatggcggaactggaactggaacccgggtctgtgtgacttcggagtctgtcccctgaacatctgtgtgtgatttccagtgtgaccatggccaagattttctcatcccaccacgtgtcgagtgtcccttcagacctggtccttctcaacaccactggaagcccctttatatgaccctcttcccagaactttgggaggaagtggggtgagatggcctgaatcctcccagaccttcagtctggagctctatgagattgctggggcttcagggccatcagggggtgcaccttgagcagagaaggcaagcgaggtccctggaaaagagcttccgagaccagatcattaaaacatctccccagaccatttcatttgttttacaagtctcagaccaacctcagagctgaaaactgcccaacaagggagcattctctctgcacattcccagcttggcctcacaaagccctctgtcccttggaggagtgaaggagtaggtgtgtcccggtgggtgtctctaaggtgggcctggggaccctactgctcctggaggggacactgagacccggagaggctggccagcttgctctggttcagccagtgctgcgggcactgtggtcctccaggaattaaaatcacagcctcttgctcaacaaatacagttcattccgaagctgcttacgtcccccccagagtcatcttccaccatccatcatgctgaaccgggagccgaacagcgctgggtcctgctgcttgtgggaaagtcctgaagccatctggaaagccaacaccacaggctgccagggttttaaggcaccgccatagtcttcgtcttcgtcatgtttgtttggaacaacggttactgtccaggctggtgacagaccccgaccaccccagtgaccagagctggttaaggtggcttggacacggtgccattcggtggatgaatgaatagggccctgttaggaggggctggggtggtaggtgtccccagtgtcacattcacagagggcctcaaatgtggacattcatgtgctctacaaaggagctgacagcaccagataccagacaaccacagcggcctgcaacagtgtttaataaaagcaagagccgccggcaccatttatcgagtgtcaactttacacttggccccaatctcgagtctacggtattaactcacatattcctgacctcaaacccatgaggaaggctgttactgttatctccattttatagatgaagaaactgaggcacagggaggttaatgggctttctgaggccgtacgctggtagccggtagagtcacgcagttctgattgagagtcatgtccttaaacactgcctggctctctctcattgaagaagatacttattaaaggagagaggttaaatagtccacggttttcataacctcttcttggcatttgttaagctgcccaggatgtctctcagaggtctgtgaattaaatgtctaattacaaggccagtgtgatcggcagccctggagacccgagacgactccagccccctttatgcatagcatgccctccttgtgccatccaaaatgcctgcagtttctgggctggttcctctccctgagttaggagcggatttagttaagcttttccaatgggattaaggagtccggacccatgacgcatcctggtgacataccagccgtgctgcagccccaacacaccgtgttctctggagctccaagagcatctccccaagggctccggttggagggctcaggcaagggggtgcccggtgggctggggatggtaggacctgctgacgggctgagcccagcaggccacgtgctgggggcttttaccatctcctcaatcctctcgagtaattctgagatgtacaagattggccccatttacagataaaaaccctgaggcccacaggcaaaaggaccatccaaggctcagagctggtcaggccagggcgtttgcctgcaccagtgatgccctcctaagttcttccttttcagggaaatgactgtggttttggcaccagagctaaacatggaatgtcccacccagagggtgcaacaagaaggacgggaaggggcagggcacgggaaggggacaagggctggtcacggtctccggatcagactgtcagagctcttgtcagtgcctccagtcaaggggctgaggttgcccagggaggaaaagcatcaacgttttctagtagaagcactgacttttttttttttttttttttttcaagacaaataatcttttattcatagtcatggtatcctccagagaaaataaactgataattgctaataaaaaaacaagcactgtattccttgattagcttgattcctttgattagattacaacaatcttgtagtctcaaattattacgaggtaaacaataggttttattcacctactttttaatacagcatatcttagctgaacataaaacccagagaatgtattactgcggaaactgtgttaaattttttttcttctgaagctgtgtgaagaaaagttagagaggtatttgtttaagcagtttaaatataattctacttagaatccaactggtcttcacggatggtcattccagcactataaacttatgttatatccactaatacacgttcgtaattcgatgattcttagatatttacttctagataggaatcaattagatagacctaaagaagttagaaagtattctgaaaaacaaagaaacatatatgaaatacgtctgggtttgttaccttcttaatataatgtaacctgtctagagatttccagaatgaaaaacgtaaggttggaatgactcttattagtttaataagaaaatatgtatcctataaaatatttatgatatacagagttttaacgaaatttgaacgattaaaattaagccttggctggatttcatcaaattcagtgtggagctttggagactcattgaacagttctttccttagataattaccttgcttagaagtgctcctatccagacagaattcccgatttttttcacttactaagagaagtctgtgccttcatgcctttataaatggagtaaagcatgaatacattttctaggaagagggatcttgtttattggaatcaaactattttaactagaattatagtaaggaaaaattccaaccacagtgatatttaaaatggttttattctctttcttagcttttatccatctctttttgtaagccacatacgctcaaacaaactaataataacagtaagatctagtttcaaggtagtggactgcaacattgaagtctgtggacttctttgcaaaaaaaaaaaacgttgcttggcattaacagtttttctatcaaatacaaaattctgagtgagttacatcactagagagtatacgagtcttccactctggtcggcttattctatggagtgagactgatactactgcttatctcatagttttgttatgatagttaatatttattaaaaaactcagactaatgtttgacacagtaaatgctaaagacatgcttacagaataaataaatacattcataaataagtcagtctctgttctagtcatgccatattaattacaatccacatgctagagtttgtgatattctctctgcctgcttccccacctgtctttctatttatttaaatcctattattcttcaaggactgtgcagatcccacctttctaagcccttcaggacagacaactctggactctactaacctcatgtttctccttcactcatttgcacttatgcacaaatatcctgtttgctttatttagcctttactgttggttgttaaccaggcaagggcattagaattccctgagttgcttttctaaaatgtatatccctaggccaaacccctagaattgttagattcagtgagtcctgcctggcaccaaaacatgcacattttgaaaaggttcttcagcaacaccaatatacgccactagtcaagatacactgatcaaaattaccttttgttggaggtatgcagattttctttatcaacacaatcatgaacatcttgaagacacagaccatgctttgtttttcttatgtaaacatggccactactgaataacactcctctttcatgtttcattgtaagatctctgagagtggcgcccaggttatgccttgccaatgggttggggagcgtattagccagttctcatgctgctaataaaaacatacctgagaatgggcaatttataaagaaagagagggttaatggactcatgtggctgaggaggcctcataatcatggcagaaggtgaaaggcacatcttacatggtggcaggcaagacagaatgtgagccaagcaaaaggggaaaccccttatataaaaccacgagatctcgatgactaccacaaggacagtatggggaaaaccacccccgtgattcaattatctcccaatgagtccctcccacaatacgtgggagttatgggagctacagttcaagatgagatttgggtggggacacagccacaccgtatcagggagggacaaagagagccacaggtagatcattcaactgttgccacaattatgctatgtcatgaataaccacaaatcttcagtgatctaccaaaaaaggccctcttgttcatgtttccagaatccgcaggaataggctaggcacctgtgctgggttttctcacacatttgtggggtcagaagcactgccttttgaaagcccccagccttcggtgccttccagcagagacttaaagggagaggtactgactgggactccttttgattggcagatgtaaggcacgtgggtgccacgatggggagctaagccacaggccatttctcaggcctggcagagcccctccccagacccttcggcccaggcagctgaagggaggactgagcaaaaccgatgggaagaggggaaagcccctcagcgtgcctgagactacgacccttcctgcccacaggggctcagagccatgagaacatctctgaagggccgaaggggccggactagccagcagacctggacaggaaggggaggggtggggcgactccagaaaggggctttcggccgggcgcggtggctcacacctataattccagcactttgggaggccgaggtgggtggatcacctgaggtcaggagttcgagaccagcctgcccaaatggcgaaaccccatgtctaatgaaaatacaaaaaattagccgggtgtggtggcgggcgcctgtaacttcagctactcgggaggctgaggcaggagaattgcctgaatctgggaggcagaggttgcagcgagccgagattgtgccactgcactctagcctgggcgatacagcaagacttcatctccaaaaaaaaaaaaaaggaaaggggctctcaagggtggaggtcaggtgaacctgaatacttaaagagcctgtagccaggtgaaggcaggtgctggctacaaagaagcatgttgccaacgctggcagcaggactgctggtaccctcacaggcggcaggtacagccatggtgcaggctgtgtcggtgctgggtggccagcggtgggtggggggctggggatatggctcttgctacatgggctggtggcctgtggctttgggcttggtcagacccagatctgtgctagcgcaagtaagctttgccccagagcctgtcatctcctgggatcttgtttcctgttggaaaacaggctccagagaggcgcatgtaaaccagcacaccccaaagatcacaaattcctcaactctccattcaccccgagtcttaatcactgacacatgtactcctctgaacttaacgaaggccaggatttattgctttcagagaatgaaaagctctatttttttttttaaacttaaaaggtcattcgtgtgagctttgattttcatgagaattccttgtaacctgcctgctaaaagccccaccctatcctactcagaggttctaggtgggcaggtgaggcctggggcatggccggtgggcgtgggcaaggcctttggcaggcacttgccaggagaagctgggcatgcaacatgcgccgtccgctcccagccgagctgacccttgcaggccttggacagggaactctcggggttcctcggaaccgtggaccagcgccctcctgagggaagagtgcagcagcccggcatggcccagttttaacttccacgtctcctggagcttgagtgggcactgggttgaccgactgtcacggtttgctggggactgaggggtttccctgggctctcagtgctgaaatcaggtcagtcttaggcaaactggaactgcgggtcactccgagggcatctgtaagaagggaggcctcccccgccctatctgcccactgcttccctgcacccggccgcatgcccctccgtcactcctcaggcctgccaggcttgccctgccttggggcctctgcaccagcttccctctgtccagggctctcctctgcccattcctgcatggctgaatgcttgccgcctcctcgggatgccttccctgaccaccagcctcaattttcaagtgcctgcctcatgcatttgttgtcacattttcctcttttatcttcttccagacacttatttctatgaaaattgcctagcttattctatgtgcttttcagagtttatggtttctctcttcttgctggaacatcagctccctgagggcagggctcctgtacgctggctcgtggctgcagcccctgagtggggccattagtggggaccccaaggtgttgggtccccaggccggaacaatggttggcctcgctggcacagagccacctgaatcgggaagaagtgggcactgatgaggcccttatgaccccaggcagtgtgtagccaggttgtgcacaggtagacacagccctgcgtcccctcacctcattctcagagcaggtcccacgcggcccccacgcctggcccctcagctgcccagctctgcaggatgctgaggtctgaggaagccgcgccagctgtgcagtttgcagaccacagctttggaggagcccgagggtgaaagattggggggcttgaggagctgctcccaaatcctggcctatgaggctacaaggcccgcccagttcccacgcatccttgcctcgcaccccaggggacttggggtgattcatgacttctttttgacccccagggccagggctgaggcccggcttccgccaaagagtttcagctgttgggccgggtctgatgtgcctggcccttgtcagcagaaggtgcctcccggtgtctcacaccctcctttccctctaaagccacagctctccgctgtgggggccttctgtgggcctggaggtcgcatgggcccagagctggatcctgcctcctgcgcactccagaggtggggtgtgggcaggctgtgcgctcagccataggtggttctttgtccttgccctgagagggcagccacagtgtgtccagctgtgttttgggcagcaggattttaaaaacagctttattaagatatgattcacataccatacagttcatccagtggtttttggaagattacactgtatttgtaaatttctaaactattctgtaaaaactgtggtagaatacatagcatgaaaggtcccatcttaaccattcttgagtggacggttgagcggcatcaagcacagtcacgctgttgtgcggccaccagcaccatccctctccaaagctttcctcatcttgcaaaactgaaattctctgcccattaaacactacctccttatcctctctccccatggctactagcaaccacatcctattttctgcctctgaatctgatgactctgggtatctcatacaagcggagctcagcagcatttgtcctgtgactgtcttgtttccctgagcatggtgtcctcaaggtccatccatgttataacctgtgatgacgaggtcaccttcccttttttttttttttttttttttttttggagatgcagtctcgctctgttgcccaggctggagtgcagtggcacgatctcggctcactgcaagctccgcctcccaggttcacgccattctcctgcctcagcctcccgagtagctgggactacaggcacctgccaccatgcctggctaattttttgtatttttagtagagatggggtttcactgtgttagccaggatggtctctatctcccgaccttgtgatccacccgcctcagcctcccaaagtgctgggattacaggcgtgagccaccgcgcccggccccgtagccttcctttttaaggctgaatcatactctgttgcatggatagactacgtttactctgtcacccaggccggagtacagtggcacgatcttggctcactgcagcctctacctcttaggttcaagtgattcttctgcctcagcctcccaagtagctgggattacaggtgtgcaccaccacgcctgactattttttaatttttaacttttttttttttttgagacggagtcttgctctgtcacccaggctgaagtgcagtggtgtgatctcagctcactgcaacctccgcctcctgagttcaagcgattctcctgcctcagcctcccaagtagctgggactataggcacccgccagcacgcccagttaattttttctatttttagcagagacgggatttcactgtgttggccaggctgttcttgaactcctgacctcgtgatccgcctgcctcagcctcccaaagtgctgggattacaagcgtgagccaccgcacctggcccacgcctattttttttgtattttagtagagacggggtttcgccatgttggtcaggctggtcttgaactcctggcctcaagtgatccacctgccttggtctcccaaagtgttggtggcatgagccgctgcatgtggcctcaaaagatcattttcatctgttcccttgtgaacaggagaggcagaatccctaccatcccaaaggccatttcccaaaggggaaagatctggatttgcgcgctgcttctgtgagtgtgacctggaacgagctggctcctgcctgggggctgccaaacgagctggctcctgcctgggggtccctgacccctctccaggtcatgtgaagatgagccgaggtaaccgcagacattaaacttctcacacctcactttcctccgtctcaaaatgggcatttgtacccaatcccagggcctgtcactcatgtggtcattccagggacacccacgggaggccctgcaggcactagggaccgggagttgggtcagccctgtccctggggttccatgcgcagcaacactcccaacacaggcatgcaccacaacgcagcatgggaaggcaggctggggacaggcggatagctcggtgggctgtgcccccagtgggtccactcgaggacatgctgtccctggcagctcaggggtgctcatgcccttgcagagccagtctccatctgcagggcccttcctggtgtctggaaacttggctctttcggagggaggctaagcaggacggggtggaggatgtggggtggcatgtggcgctgtaggagtagggggtcgcaagtgggcaggggcctggatctggggcagcagaaggggctcctgagcctgggggtgagggcagcccagctgtgtgtggttatcagacccaaatggtcctcaccatgccctgtggtcctggagggcagggccctcgctggcctgtctctggggcttggcaaagggtggatgcacagggaatgtccgtggtcctgagctcttgccctttccagacccatttcattgcccacaaagggccctgtggtaactgatctccctgctctgatccccagtccccaaggcccctactctgtggggaccctggggactgcatggggctgtttctcatccattcagatgctatagtgtggtcagagagttcttggtctccccagacacaagcagtccctttcatttcctccctaggtcctgtgctgctttgagtggggttgggctaaccgcagagggtccttcctggggagaggctaagggggatctgctgggaagctgggagcccctgctgggagtggcagccccatcctgcaggtcccaggtcctgcatccagtgcaagcctgggcttctgcactagagagatgccaccgtcaccttggctgcttctagagctcttcggaagacccttctccctggagcagggcgctggaacgctgcagggagcagggaggtggctcccacatgtggacctaccatgagccatgcgctgtgctgggctgtccagatgtctgctcttctagtccgtgcagccctgccaggaggtagcatcaaccctcctttgcagatgaagcaaaagaggctcacagagaagtgatatgtcccaagtcacacagctggaacagctggtatgtggcagagctgggatgaaaacccggatgtgttcaattccaaagcacttgccttttcttttttaaagaaaaagaaatgtgacggcctggggtctctccatctattcagatgccattgtccagtcagaggtccctgggcggccctggacacaagcagctcctttccctcttgaggtcctgtgctgtgaggggtgtgggtgggctgaggcccttttgggggcacgagggctggggttactctggaaggtgcagggggtgcttggccccacccccgtttcagattcagtggggctggagaatttgcattttcaacaagttcacacgctatgccgggctggtctggtaaacacactctgaaaaccaagtggcttccttttctctgtctttaaatattattttctcttttacgaaatatttccagcctcatgtgcttttcaccgtgctgtgttgtcttttatgcgctcaggatggctggagtcaagttgtgagtttgcaaaaaccagggagacccattctgggttcatcaaccgccggcgaggatttctactacaatgaccacgaccgctgctgcgtggggtgtgcttacggagcagtgcccagtcctgttctgagccctgtcacgcaagtcgctccgttgcttttcacagccacctcccaggcagaagccaccaccttctcactctaccaagggagggcgagtcactggcccgaggccacacacaccacaaggctggggttccgccccaggtggtccgtgccacaagcgcgcacccagcctcaggattcaatgagctgggacagaagtgcctcaccagttctaacggaaatgggtcgaatggccagaaccaaggtcctctccccacccgctaatctctctgactgagttcccaggctctgtgagcagcatcgccacctacctgggagctcggcgggggttgcaggtggccccatcacatccacagttcctgcccacccctccagatccgagtggcagcaaagccgagcttctacatcactgtctgcacgctggccctacagggcattttaggcatattaaccatgaacctcacaaacacctcgcgaagcagccactatcactattcccagctttgcagctgtgcactgcagccccaagaggctgagtgacccgctcaaagtcacgcagtcaggaagagaaagaaccagacgctgaacttctgtcccctccaggtccaataccagcgtctccccaggctccaggctccagggtcgctgcctccccactgcctgccccgtttcctctcttgcctccttcctctcattccctaccctttagtcagggccatccttctaggccagagatcggatcatgccacttccctttaaaggcatccacaggttccccgctgtctttgggacagcgctccctggccagcctggacttccctctccagcccgttccgcccagctccacttgccctccatgagttactcctagcccacctttagccagacacctggcctggacatgctacaccccctgagctgtgctactcaagtctccaacatcctttctccctctttttttttttggccaggaaaactcctactcatcctacaatacccagctaggacatggacttatgtcttagccttcccagctgcttactcttgggccagggaatccacttgctacagtgattacttagcacactgggatggagccgtctgcccatcagtcccattgccagaccacgagctccccaaagctgggaccgtgttggcttggtctaggtcctctgagtggcccaggcccaggcagaatcctgctaaacaggaccaaggtggacattcaccaatgaccatgcaaagaggctcccaattccagggtgtccacagcggcctgtgcctgggtctgatgtttgccgtgcactgggaatggagagcatgtggcctttttccctttttaactgtcgtgcctgcgcttgtgcctgcccagtctgtccactgcggtgggaaatgccagtttatgaaccaagggtgagccgccggggtctttctagccagggctgttggaaaccacttgagtggatctagccctagtaaacggctcttaaccactccccagggagcacccgagaccccagataataagctccatgtgtgtgggagacaggcccattttttttcccaaggatttatgagcgggggagtattctcattgacctccatttcaggaaagatctctttctggaacacttgccgaatactccatcaacagtgaagcacacgtgctcgcggcaagcctgcttgacggccccatagccagcatatgtttcttgtctcctacgcactttagcactggctctggggaatgcgtgtatttctgaacgtccctaaacacagctctgactgaagcacttataatttaccctccatgaaagccatcgctgctctttccaaacatacttggaagtggattcaaagtttatttagagagaacatttaaaaaaaaaaaaagaccgaacgagagtgcttgtggattcttactcccagccccagcttgctgggaccttggaataattccttcggctcacagacatgacaccctgagaagaaaccgtgaacatgtgggccctggccatctgtccacgcaggcatctctccagttcgtcctctctttatttattcacctgttattctatctgcttctccctccctcagacctcctttttcttttccctccactcacgttcccccacctcatcattcatccatttctccagccctagaaaaatgactcaattctttttgtttatttattgtttttgagacggagtctcgctctgtcacccaggctggagtgcagtggcgcgatttcggctcactgcaacctctgcctcctgggttcaagcaattctcctgcctcagcctcctgggtagctgggactacaggcgcctgccaccacgcctggctaattttcgtatttttagtagagacggggtttcaccatgctggtcaggctggtctcgaactcctgacttcgtgatccgcccaccttggcctcccaaagtgccgggattacaggcgtgagccactgcaccgggccaaaaatgactcaattcttattcgggggtgaatgaatgactttattcatccagacaatcaaatatccatttgcatattggttcatccattcatccatccattaaattagcaatctttgttcattcgtctttctgaccagccatccatcaaagatgtactaatgacccactctgtgcaaggtactgggatacttcggtgagtgcatcccagttcctgcccttgagtagctcacaataatctgggagataagatgcaaacagccaattacagcacagtgtgggaaacgctattagagacacgtgcaggtgccctgggtgtcgggaaacgggcgctgatgcctgggaacaattctgggtacagaaggggctacggaaaacacctatggaaaacctgcccacctctccctgtctcccagaaccagtgaggcagccacctggggtagatcagacttcatggccactccagggccttggagaccttatctgccaggaatggtcttctggaatgggctggttcagactcgccactcccttagtgattcctacagcagtcctggggggccggtgttgccaggtccactctgcggtggaggagaccggggctcaggcgactggaggggtgaggcgcagcagagcccacgtgctggagtctgaacactggcagacagtgcacgtggccctctgcaccctctgtccaggggtgcagacagtgcatgtggccctcaggacagcaccaaccactgggctacctgctcccctctgaaggcctcctgggtgttcaggacctaggtccgactatttggggtcaggactctccctgcgccccacacagctcagagctacccgaacagtcctggcagacaagctgctctccctgtgtgggaaactgagtgctcaaaggaccccggcaagccctgctgtgtctcagcacctcgctttcccagctagggctgaaggactgacaacgaggaccttgcctgcagagcagagactgtgcgtgcccaattccaggctctggccaggcctgggctctggatcctgtggagagcggcacggtccaaccaagaaccctgggagctggcagacccagcctccctgcctgggtgcggagggcagggcggcccctctgccctttggccaagggttcctcctctgccacggcgaatgtctggggccatccttcctgccatccactcccacacgtccccactgaatttcctgttcctcatcccccctgtccctgtccacacgccccactgcgttttcacctctgggcctcccttcccccaggctctgctctttccatccagcctctccctgatcctcatccaaggggcctttctaacactagccaggccagtctccactagaggaacaaaaccaaagtccacggccaccttcttagcgcagagcagcctggtaaagagagacccaggtacaaatcctgactctttcataggctattcccacgaacttgggtaactcaacggctctgggccttagttttcccacctgtgaaatgggtctattcatggctttcttagggagcagctgttagcattatggctgagtataaagtaaggctttccctcaaaactatgcttcagaaaggaaggagtcattttgtgttcaagcctctactgaagtctttcgtttaagggggtgcatgctcaactaattactcgaaaaaaaagatgacaatgtactgtttggtgccgacacacaacctaaaccaacccccgtcaacgttagttctagacggttatagaggtaacgcaaggggtctattagaaaaataagaggagcctggtagttaagggtggagactgaatgtacaaattcattttcactacttccagaagggcagagaggtcaggaaaggaaacaccagcaacaataagaatgctgagaagcagacaatgagggctacctgccgatacagaaatgggcacgaacacagccaaccccgggaggctctagctttgggggtgctggatcagacctcaggctccccagccaacgagcactgtcagctctggcagctcaaagcccctttgtcaggcagaaagcccccctccaggtggccaatttcaggtttcaagtgtcagctggattttctgctcactgtcccccatagcctgctagaaagttcactgccaaattgatttccaaatttcgtgaaacaaatttattcccaggtgaaaactactgtatctgatttcttctgcagatgacccagccaacatggaaatccgctttgtctgactttcgaattcacccgagtcggcttccattgctcagacaactggacggggccccagttcccactgcatcccagccagatgaagagagtggggcctcaagtctgtcagccagccctagactctccacaagccaggccccaggctccccctgccagccaggaggcagatagtccacagaccccaaaaagcacccatgcctacccacccccaccaggaatggccactgttttctcagccagaagtagggccaagggaagtccaaaaacgccccgcacccaccaggctcttagggaccccgagtcacacctgtcccctcaagattctctctgggccatcgcagtccacccacacttggatgcaggatgaaaggctcacacatggctgggcccagtggctcacgcctgtaatcccaggaccgggaggccgaggcaggcggatcatgaggtcaggagtgcgagaccagcctggctaacatagagaaaccccatctctactaaaaatacaaaaattagccaggcgtgctggtaggagtctgtagtcccagctactcaggaggctgaggcaggagaactacttgaacccgggaggcggaggttgcagtgagccgagattgcgccactgcactccagcgtggatgacacagtgagattctgtctcaaaaaaaaaaaaaaaagaagaaagaaaggctcacatggaagctaccagtggcctgctccctggtgtcctcatcccctgtgactatggcgccatcagttgaaagatccaggcggcggaggcctgggtagcgtcctctggctggaaggtcccaggagggagagtattcaggggggagagatgctccctgcaggcttttcccctgaaaagcctgggcccctgggaccctgggactgctgccctccctgcagaagaagggcctagggtctcctgcccatttatgaaggctcaactcacacacgcactgtattctgtcggctttgacctctttcagtttatttggtgctcagtcctcacagcaaccctgtgtggtgttactccctcctgactgggtcaagccgtctgaagcctccctctgcacacgggtgcagatcgagctatggctgagcgctgtggcccatgcctgtaatcccagtagttcacaggccgaggcgggaggatgacttgaggccaggagctcaagaccaacttgggcaacatggtgagacctcgtctctacaaaaaaatactatatatgtacatatatggtgtgcacctgtagtctcagctactttggaggctgaggcagaaggatagctggagctgaggagtttgaggttgcagtgagccgagattgcaccactgccctccagcctgggtgacagagtgagaccctctctcaagaaaaaaaaaaaaaaagatccagccacctcaccttggcctgtgtggccctgtctgatctgtcccttgacacgtctctgttctcatttcaggtccctctacccagtgaaccactaggacctcctctctgctctttcaccccagctgcacaatcctctttcagggcaggtgggctctgtgcctgggaagccctgcccactccccagcctggctacttcttgtcactcaggtctcagctcagtgtcacttcatcaaagaggcacccactggcagtcctactgaacaagctccgccttcactctgtcacatcctgtcctggctcattgcatgtttccattctgctagaatgcagacttctcagccggataaacctcgtctctcttatttcccagtgcctggcatacagtaggagcttcataagtattggctgaataagtgaaatgagaacacgaatgcccagtacaaaaggagtgactggccccaagttgcaagctggcagaggcactgcctccgctgtcatgctatgttcccttctggggtactggcttgggcggcttgtgggtggctctgtgtcaaaggaacctcctggaaggcagaaatgacccttctgggtatatctggcagaggcagttgcagcgcctacaaatcagaggaaagtgaggtcatggaaggtggaggctttgaggccaaacacacctgggtgggtcccagctctccagtcacctgctgcatggccctgggcaagccacctacactccctgaggctcagtttccccatctgtaaactgggcataacatggcacttgtcttctggattgttgtgaggctcatatgatgccctgcatagcaggcacccggccaggtgcctcagagccctgtaaatggtccccaaggaatccgcggccctcggggcagggtgcggagcagggagggcgaggctctgaggacagaggcagccaccgacaggagggtggggcaggagtaaacaccatagggcgcctgagtttagacacatgcgcctggcttctgggttacaggcagggctgggccatgtgcagagtttttcatcttttaatcccagctgttatcagctgctgggaaatagctgagcccagtctcctagctggcacaggcttcctctgaattccacaaagagaacaaagagttccgaaatagtgacacagctgtcctgaccggcagcccgggcagtcagccggcagggccaggccaggaggaaggcacgcaaaagccaagcaaagccacttggctagagggtgggcacagctgcgggaggctgctggaggcctggctgactagccagccagggaccatcccaggctctgaggctgctgggagactgggggtgaccttctctctgagctgggcctggcactgtgtgctcaggagccttctggcggtgtgaaggtcctgctccgggactaccccagggtgcaaagtgagtggcgtggctagatccctgctggtgacacccccagacaccaaagctacctccctttccagagcttggagtggtcgtctgcagcttttggtcaccctctccacacctggatgctttccacagcgcaagccccaccttccagcactcactgcacatttccctgctgccttggctgctaggatgcaggtgtgatttacggtccacccatcagaggtgtctcagtgagattcggactcggcagaattgggtggggacagagcatgatcctgagccagcagctgggaggcagcttccagatctggcaggagagcttgggaaccattcctggaggcactgttctttgaggtctctggacccctgaataacctcccactacccttttttcttttggcttaaactggctgcagtggattctgccgtctgcaactataaatcctgagaaactccttcatgactccctggcagggcttcaaactccgctgcctacagggatacacaggttacacagacacaagaaacagactcgttcagctaaaatcacaaggcagcccacttggtctatgtttgattttaacagagatgtggttccaagtcacctttattagaaaaaaagcatgcaagccccatggtaaatggtgatcgacgctcgacttccaggccagagggacaccaggagtaggggactgtgatgccctggagacgggatatcctatctagagggagtggctcctagatagttcacactgaccgtttccagatctttccatttttcaagagaagccagacatcgggattttgatgtgaaatatctcttatttttcatttttgactcatggtttgtttttttttgtttgtttgtttttgagacggagtctcactctgttgcccaggctggagtgcagtggcccgatcttggctcactgtaacctccaccctccgagttcaagcgattctcttgcctcagcctccagagtagctgggactacaggcgcctgccaccgtgcccagctaatttttgtatttttaatagagacggggtttcaccatcttggccaggctgggcttgaactcctgacctcgtgatccacccacctcggcctcccagagtgctggcattacaggcgtgagccaccgcgcccggccgactcatgttttaaaaaacaccatgcaggccaaaaaagccctggaaggtcagcaccttccaagtctgggtttggcctgtggctgcctttgtggccatggcctgcagggttaagttccagctcttgatgatggcacttagggcccctggcatgaatccagcgtcctccctcaccatccctgcatgcagggacccacagttcttatctctgtcccttatccaggctgcctccccacccagccacgccctttcatgtcctcactcctctgcctggcaacatgcctgtgcggcctggtcccagtgatcaagccctttgtgaaaggcatcccctgcctcctggacccgaggcttcagtcttgaggcgcccacagtcccctgcacacccttccatcctggcgctcctcatcctgggtggtgatcatcagggcctctgcccccaggccgggcctgggaggacgtccatctgcagaacaagcctggcctgtgactggccccctgaggaagtgggctgctcctggggtctcaagagcatccatcctggtagaacagggtgttggggtgagtttagagaacgcagcacggggaaggctgatccaccctgcttcttcctgtctcagtgatatgaggtccccagacctggacagggcccgtgaggtagccaaggggcagctggactcactgtccagtgcgtgagcccctggtcagtcccccttccagatcttggaaatgcctgtgcaccttcggagagaggttttccctttctccacaggggagtagctggggaggttgcagccaagttccctgtcctccaccccatgccctggggatgtccgggtcctcaaggctgtgggctaagggtaccctgggtcttctctgccctccactgcagacttgcctccctcctgctctctggagtgcggctgtgatgcgtttcagttccccagactctaagcagcctcacctcacgtttattaaactcccactgtgtgcccggcgcagtgctgggtgtgtccacatcagcaagacgacccacaacaattctctgagatcagtctcatgacgtgcccaaagcacatgcctggatcgagcccatgcccctgaagccaatcctgcccttttgccgaaagaaatgatttccgtttgtgggcaggaagggggccaccgggcggcaccggccggcacaggccaccctcttcgtgcctctggttcctcaaatgaaataagctcatgggaacaagtccacattagcatttcaaagaggaccataactcggtgattactgcttgcacatgtgagggcttcccgctgggagtgttacctagcggcacccatggtttgatttccccaagttgtgtgttcccttacacatgggaaatctcaagggagagacacttcccaagaaaattacctacatgggtcttgtcacctacctgccatctgcacttaaagacagcgacacgaaccccactagatgacacgaaccaagggactggtgtagtctgggtattttcacatatgttgtctcacacgtttccgccaagtcttaggaggtgggaatattattagtaattttacaggtaagatgacagggcccaaagaggtggctttcttagtgtcacacacttagtgggtaatgaggtgacatcctcagatccaggcagctgaccacatagcctgtgcctcccccacaccccagacttggatggggctgatgagcacgttccgacattctgttcaaggcacgaagggtttcctccataggtggagaccacaggcgtccctaagagcagccctgaggctggggagcctggtaagtgggaagtctcagagcggctcagggccacagaccaaacacagtaacgggaagttgaggagggcctgccctggtgcgccaaccaaggaggcgtgttcagcagcaatgtttcctaattaaaaatgaaaggtgggatttcacaggaatgctacattttaaaccctctagccactcagatctttgaagagaaatgatgtgttcataataattttggagtggataacataatttacaaatcacaagtgtgttctgtgatttaaagtgatggaagggctttctgttacctcatggtaaccaggaatttcaagaggcataattgaattttaatccagtcccataggaagagcggtccccctgcgccgggagaaggaataaggaagacaaaaagatgtcagctgcttagatcacatgacttcctgcttatttcatgagctgaatatgcagcgcctgggcatgtaccagatattccttcttgaaactgagccagggcaggtggcctggtccatgtgtatctggagacccttgtgctagaatatgccagtccttccagccatatagagactgcagtttcagtatctccctatgaagaggagagaccaaaaaggagtttctgccttgcctgctttcagcatagatggacaattcaaggaggaagatccgcagcaagctcccaggtctaggaactagacctaggacactgtgatcactggcaaagtgatcactgtggcgaacttcttgcacagttcttgcaaagttgcaaagttcactggcaaagttcttgcaaaatgccagtttgctcactatatttgagctacaattgatctaccatgtctttgccaagaattccaaaggatttgggataagcaaatagccttgctgtatcaccagcttttaggtggctatgtttggtgtctgtttctgaggttcgttttgccttatccaagtggcaggctaatggggacgaagaagccctctttagcatgagtggaataagccaggtgcccaagggaagcctagagttttggggctctgaggagggtgaggtgaagtaagaacccggcacaggctggcacacacattaggtgttcaataacatctaaaagcattcagatgtttctcaaaaagctaaacacagagttaccatatgacccagcaattccactgctaggtatatatcccaaataactgaaaacaagtgttcaaacaagtacttgtacacgaatgttcctagcagcattattcacaacagccgaaaggcagaaacaacccagatggccatcacctgatgaatgggtaaacaaaacatggtctatccatacaatggaatattattcagccataaaaaggaatgaagtacagatacatgctatgacatggataaaccctgaaagcattgtgctaagtgaatgaagccaggcacagaaggcctcagattgtgtgattccatttatatgaaaagtacagaatacgtcaaccagagatagcacagactggtggttgccacgcagaggccggggagagccactgcttacaggggaggagtatccttttgggtgctgaaatgctttggaacgagatacaagtgacggtggtgtgacactgggaatgtactcaaccccactgaaatgttccattaaactggttaattttatgtgatgtgaatttcacttcaataattttaaaaaagaatccagctaatagttcgtcttccttttggcagagcaatctgtttcatcttggacttaacggtgcttttaaaaacaaaaattaaaaggagggaaaactggctctcctaagagggtagaaggaaaaaaacaaaaaaaggcaaagctgaaacaagtgcaactttcctgcagctgcttttccaaggcctctgctataccgaggcgtgggtttgcacttgcaaagagtaaatacactcctccccggagccagcgagctgctcagagcggcggaaacagggatcacgcagatctctccagtctgtccctgccccctattggaattcgatttcccatgggaggggggcctgcggaggacatcagggaatgtgcagcatggaagttgcacgtgtgggccacgacacattgcgccaggccggcctcgctcatctgagaggggtctgagtgtggagccatcctccccacagcctgcgtgcacttgctggagcgcagagacccgcgtgtgagggcgaggagagcatgcgtgttcctgtcccggtgatccccggccagaccccgggaaggagcagaggttcccgtgggagttggagcgtttgtaaaccaacagatttcacccacctttccactctggaggcgggctctaatggcacagtccagacgtcacctctccttagtttgaaaattggttccataaattggagtgagttcaaacacatgagacccttccagaaactgggctgactgccaggctctccacacatccagagtgggtggaaagacagagagacggagtggggtgcagggttatggagagcatccttccagggccagactccctgctctgggggtaggtgggctctgccgggctgggggaggcgctgtagagggggcaggaggttggggacactcaggagccactgctctccccgccatccaggactgcaggcttcctctgtccccagagactgaggctgctccacagacaccccccatcttcctggcacgaaagcatcactcactgtccaccattagcgtctggtgatggaaacaaacaggctcatggggtcatggaggagtcaaaaaaatgataattttaatcattattatattttatgatattatacaatctatttgtttatatattttttcattattattgttaaaattataatccctgacatttatggagcagtgacctcatgccaggcactgtgttttgcgtgtatcatttcacccaggctcctgacaactccgtgaagtggcagccactgttatctccatgttagagcaagctgagaaacggaggggctgtacttggggccacacatcttgggagtcttgggagtatgggcaggggaactgacccatgcggtctgactccagggtccatgctgttagccatgactttttggtatcaggtgcttctgaaagtcccttgagccttgccagggacccaggcagacagcacagctggcacagtcagacagacccacctcagaaccaggctggccagagagggacggtgtcagtctcagggcctgatctccaggaagtccagagggcacagtccagagggcacagtgagatagcaaaggctggtcaagccctcagaatgaagccccagggacagcaggtgctaatcccacaacccacaggactctcagcaaggactgccttcccgcaaagagcatggtactgtggctcaggtgcaagctggggcgccgctgccgtcatcctggaagccctttaatgacagcagcgcagcaggttgctcccccaagaatgggggtagctcctgggtcacccagcaccgggtatggggtagctcctgggtcactggccagcaccgggaatggggtagctcctgggtcacccagcaccgggtaaggtgttgctcctgggtcactggccagcatcgggtagagaagtcggcttgtgtttggtgggaaccatgtacttaaactccagatgatttggttaatgggggggtcctggggaacagagaccagctgaggatatgcagatccagggcatcagaagagagggcgaccaagtgcccacacaagggggatcctctgcctctttttccttctggcttaacaggaatctgtctaaattacatgtaaacccgatgagactatcacagctgaatgaaggccagagacaggctgaggcttgtctctatcaacaacacatcttagggcttggaaacagaagctcagggctgcatgagcctgtgggtcatgaattcactgctcctgctttaggcaggaattcccttccagcctccagaggagtgctcatgtgtcctccccttgaacacttcccctgactgggagctcactacctcaaagagaggttcatgctgtctttggatagctctgcctattagagagctcttcctccactgaactaaaacccattgcctcaggtccactcagcactcgtctgggtccttggggccatacagaacaaacccaacctctcctcacaaaacctcctaagagatggacaggcaaagccacgaccacagtttccagaattatctctacagggtgtgtgttcctcaagcctccgccatcctgaaaaccttctctggccctgccccatccaatacattctgtccctctgcactaagactcccgaaatgagatccttaagcctcagagcagagcagggcaggaaaaacacctcccttgttcaaggcattgtgctcctgttactacagcctcagatcctgcactgaccagcaggcagctgaagccatgaggggatggcgtgggactgagcctatccttggctgtgtggtggagaggcattctcactgacctcacagccagctagcatgtgtgggggaaaataagagaaaaatgatgtaagcactgaggatatgttcctttatgcactggagtaaacatgagtggggggacgtgaatctgccagcgcctcagtgggcctcacttcccactgccttgtatggggtgggagcctccagctgaactctggagtttggtgatgaagactttcttgaactcaagggcttctgaatgccagctctagctgcttttccccagcactggagctctgtggggctggcagagagaggaagcattcctggctttcatgggtaacctgagagattttcaggagtgatttggaacatgtacaatttttgccttatgcaagaataaaaatcccacctaaaatgtgattctgcaacaatgacttatgattaggtggtgggatgggtgggtggcgggtggctgttgggggatgaagagatgagtagagggatgaggggtcgatgaatggatggacgggttagggagatgaattctggtgttgcctgtctctagctgtttgaccttgggcatctcacatgtttagccatgagatgggcatcatactccctcctcacagcgttctcatgaggaatgcacctatgaaagttcctaggcagggagcctgctgcagggatgggcctggctgagaacaaggacacctttctgaccagcaataagcctcaccaaaaaatgtgctcatgtaagaaaaacaattatccaagaagcatgtgtcagaacagctttgctggtggctccagcgcaggaggggtagaaggggaaataaaagctggtctccttggcaattaacgttcacttctgcttttgccttagatactgaagagcccagctccacaccacgactccagctacactccagccttgaaggatctgaagcccacagtgtgggctgctccgtttggtcagagcttctcaaatccctggtgcatgcgaaccatctaggaatcttgcggaaatccaggggctgacgcagaggtcaggagtggcctgaagttctctcaggagaagctgatggtcccagagcacacagggaatacccatcaaggctctgcatgtgtttggctgatggcaaactggacaccggggattctagtcctcggccctcccaggggcagtgagggagtctcaccggaatggaggtgggcgggaatggaggtggccggggcaaggcctggcttttcttacatggtgctcccactttccatccagaaagccatgctgttgctctctttgcaagcatgaagcgtgaggccaggcagcatggctgatgtgcatgggcgcggggctcaaggtcagaccccgcaggggtggctgtcctgccaggcagagatcagctggtttagacctcatactgaccatacccaccagctctatttcccccattatgaagatggaggaactgagtcccttgagctgagacaattgggctgaccttttgtgggccacatggctcctgatggtggagcagggcctggctgcatccccccactccctgtccagtgcctgccccactaggtcttcttttttaaaaagtttattgagacagggtctctgtcactcaggctggatcacagtagtgcgatgagctcacttcagccttgaacttccgggctcaagcaattctcccgcctcagcttctggactagctgggaccacaggtgcgtgccaccatgcctgacccgtcaggtctttacaaggagaataagaaccttggctggggaacccaagataggtcggtcaacacttccttcagcctccctgagttgaggcctcccatgcagggcacactttggtggccctctcccggacccctgctccaatcgggtaccccagagcacaggaggaagggcctggctagcctggctcttctgacctgagcaaaggggtcccccagtgaaggttttgttttcaaaatctacaagcaaacaggacaagggtggggaggcagatgttttccacggatggctctgccttgggctttgctctgggccctgggtgggtgaggctggaagaggctggggagccagcacagggtctcaggtgtggcctgcccacctgcccacaggttgcccccgatctgctggcagacctgggcctcttgtccctgacctcgtctcccactcacctctctccctcatccccgtttcagccacagtagtctctgttgctccagcagcagccggcaccccgcccgcctcaggacctgacccttggctcttcctgtttctggggcctgtcttcctccagacagcacctggcgagcccctcactgccttcacgtctttgctcacatgccaccttctcatggaaaactgccaccctcgctctcacccggcactggagattgccctcacctgcctaccatttttcgtaacacaccgaccttcggacctgtgaaaccctcatttaccgcctgtctcctctaaccacaacgaaagctccatggcagggggaccgctgtttgctgtgttatcatctcctcagtgcccagctctgagccaggaagtgctttgattcctttgctgaaccacttctgcggaaggctgctgagtgcggctgcagttcccacatggcccacgatggaggaatatttgcacttaggacagtgtctcccacctggagctccagcaggtctgggatggggactgccatctggccgggtgacagctggttacagttcactatgtggaatcgctagcaccaaggtggtttcctggcatcctttttctcaggccacaactcccctcctgcatttatcatcctgagtctgtttgctccatgtcttcacccacctggccttcactcatccgaaggtggcctcacaggctggcaggggcagtctgggcagtggctcaaaggcccccttgatacctgcagtttcctgggcggagacacaggctgctgctctgggttgagcttccctgggttgagtgatgccccatttcccaggtcccaccggccagagcatctgaagctccctgctgagtttggctgtgcagcagtggctctgtgtgtaaatgctgggcactgaggatacacaaaaatcccaatatgatgtgtacaggataatgcctcatcccaatcacatgtccatttgtgattgtgtttgttaacaaccctttatctcttagtgttataaactccacttaaaactgattaaagtctcattcttgtcaagaaaaaaaaaacaaacaaacagaaaaagcccatagaattccaaatagaagtaagagaaaatctatactgcaacacattcgagtgaaacttaagaccatcagagatagagagatgcctaaaagtccccagagagcagagaacatgacgaaggagcaagacttggacagaaccacactttccaacaaccacatggactgtaaggccacaggggaggaataatggttttgagtaccgaagtgaacactgaaattttgagtactgaactttgcaccctgaattttacatccagccaactgtcacccaagtgtgagggcatggccaacacattctcaaccacagaaggccctagaagttggccacataaagacccacgtgggaaacactcaggaccagcacatggttcaagacatgagaagatcaaagggtgatcagattccgaagcgaagactgtttcccgcctccacccccatcaattagctaagatccagaagagaaagagagtgacaggatggggactaggtggaggggagatcctgggacacgagggagcagtcatgtgaccgaggaacatatggataacatttttatttataaaaagaaaggattaaccaagaaacctagaaaaggcaggggacaagctgaaaccataaacttgtcggtaaaaaggcaaagactgttgattggatagaagccaaaatccagctacaggctttttagaagaaagacaactaagtcataaatcagaggaatgaagaggaaggggtgtggatgggatacagctgaaatttcttgaagctggatgtggggtccgtgcatgggagttcatgacactgttctgcttgtgcaaacatctgaatttttccattatatatatatatttttttttttttttggagacggagtcttgctcttgtcgcccaggctggagcgcagtggcgtgatcttggctcactgcaacctctgcctcctgggttcaagcacttctcctgcctcagcctcctgagtagctgggactacaggtgcacgccaccacggcccactaatttttatatttttagtagagatggagtttcaccatgttggccaggatggtctcgatctcctgagctcgtgatctgcccaccttggcctcccaaagtgctgggattacaggcgtgagccaccgtacccggcctaaaatgttttttaaaagaccattctgaacccaaatttctctcttctccaaaagtccaagacagctgtctatccctaatttttacattatgcccatcacttgaacttttagaaaagaaatgaacgtgtagaaactggttttattttgcagtaatataagtatggtcatcccttggtatctgtgggggattggatccagcacccccaaaagataccaaaatccatggatgctcaagtcccttacagaagataatgtcctatttgcacatagcttacacacatcttcaaattgtctctagattctgatacctaatcaatgtaaatgctatgtaaacagttgttacactgtattttacacagttgtttagggaataatggcaagaagaaaggtctgtggccgggcgtggtggctcacgcctgtaatcccagcaccttgggagaccaaggtgggtggatcacctgaggtcaggagttggagaccagcttgaccaatatggtgaaaccccgtctccactaaaattacaaaaattagccaggtctggtggcgtgcccttgtagtcccagctacgcaggaggctgaggcaggacaaccagaatcgcttgaacctgggaggcggaggttgcagtgagccgacatcatgtcactgcactccagcctgggcgacagagcgagattctgtctcaaaaaaaaaagaaaggtctgtgtttaatacaaatacaactacccattttttcctaatatgtttgatctacagttggttgaaaccagagacacagaacctactgaaacagagggcctactgtatgcccgttgcctccagaaagtttccaaatttctctttgttaagatcactgtagctcaggcccatggatctcattgaagatggcggggcgatctgtgtctggcattaccagaagagtcttcatgtggacagtctcagggacaacacgtagagaatttgggtctcgatccagaaaagagaaagtgccagtggttgctgagacagaagaggtgaaaaaggaacctattgcagtgtgtccaccctcatgaagctgaggatactcaccacctggagatctccagagtcatttggaatcttatgttaaagaagcttttggttcatctcttcctggtaattggcacgacatctcccaggaagatggtcatctaaagttcaatctcttggcacatttagctgatggcctgggtcacgtagtctctaactccagactccaccagatgtgcggggttagagatgttcttgatttctataatgtccctattcaagacagacctaaatttgatgaactcggtgccagtaatctgccccctagtttgaaaatcacttggagcaattcggaagagaaacacattgaaatcatttttttccctgagcaaggggcctgcttattagaccttttgaaacttcaccatgtgaaatactaccagaactgttctctaaacacacttgttctatagagaaatgtatcatctcttttttttttctcatattatgaatgggcaaataacaggactttctattttcgtatttgctgacaccattttttttttttgagacagagtttcgctctgccacccaggctggagtgcagtggcgcgatctcgactcactgcaagctccgcctcctgggttcacgccattctcctgcctcagcctcccgagtagctgggactacaggtgcccgccaccacgcccggctaattttttgtatttttttttttttcagtagagacagggtttcaccgtgttagccaggatggtctcaatctcctgacctcatgatctgtctgcctcagcctcccaaagtgctgggattataggtatgagccgttgcgcccggactttttgaaaccattttaaaatgaaattagatcattaataatttatgaaaaattttgggaggacatggtcattcacttgggtttaagacaggaggacactgcaagttcacacccttcataggcataaagtagtagttacaagaaaatattttcatcctgttaggactcatatctaagatagagttatagagttattatacattgcacatatacaaataaacttgtattagatatctataaaataaacataaaagcatgttgtatattactgaccattctagattaatttcttttggaattaaagtagatttgttaaaaaaaaatcgctgtaaattgtcaggaatgaaagaaaagctatgggtttaaattgatctttttatttatttatttattatttatttatttttgttgttgtttgtttgttttttaagatggagtttcgttctgtcgcccaggctggagtgcattggtgcgatctcggctcactgcaacctccacctcccaggttcaaattattctccagcctcagcctccccagtagctgggatttcaggggcctgccaccatgtctggctaatttttttgtatttttagtacaggtggggtttcaccatgttggccaggctggtctcaaattcctgacctcaggtgatccacccgccttggtctcccaaagtgctgggattacaggtgtgagccaccaggcctggccacaaattgatcttttgaagttaaacagacatatgtacatacgtcttaatatacatacatgcatgtttctatgtatgccccttcacatacttccccacaatctgactcttgaaggctatcaacaagaatgctaataatggttgcctgtagatgctgaaatcacacaagggcccttttcattcttttccttccccccgaaaagatcatgtgtcccaagctgcatttacgtagcaacagctaacttgttttcccatcatgattaatcagagtcatatgcagcggcccgtcggagcctctgaaggctgcagatagacaccagcctcacactgggctgataaagctccagcggaaatcccagcgacccagccttgggttggcctgggaggctgatacctcaccaaggcatgattttcctcagaggttgtgaaacagcaaaaatcattggtgggtctccttacggcctccagggacctgaaaaggggacctgagtccatgcccatctggtgagcagggtgaggcccagcagggtctggtggccctgcttgaggccgcctccccctccctccctgtcctcaccgcgcactgaggcactgggagccgcactggcccgagacctttctgcaaggatggaaacgtccgctgagccacccacacggaaactgaaaggtggccgtggaacacctgaaatatgaccagtgtgaccgaaggactggattttatctttcatttaactttttaaatttaaatagccacgaatgaaccttgaacacgtgctaggtgaaaaaagccacactgtgtatggttccactcacaggaaatgtcccgaacaggcgaatccagagagactgaaagaagtagacacggggatgccagagcctgggggacgggcatggggggaggggtatggggagggattgccagggcttctctctggggtgatggaaactttctggaatcagacagtggtgacggctgcacagtgtgtgaatacactaaaaaccaccgagtcatacactttaaatggtgaattttatgttgtgttatatctctattaaaaaaaaaaatagggccgggcgtggtggctcacgcctgtaatcccagcactttgggagctgaggcgggcggatcatgaggtcaagagatcgagaccatcctggccaacatggtgaaaccctgtctctactaaaagtacaaaaattagctgggcgcactggcgggcgcctataatcccagctactcgggaggctgaggcaggagaatcacttgaacccgggaggcggagcttgcagtgagccgagattgcgccattgcactccagcctggtgacagagcaagactctgtctcaaaaaaaaaaaaaaaaaacccaaaaaaacaaaacaaaaaaaaaacaaagaataaatttaaatagccacacggactagtgactaccatataggctagcacagttctagaaacttagaggagtggtctagaactttgatcatcctcccctgtcctggattcatgcctcccagccccagcagtgcccctcggggtctcgcatgcctccatgtgcctcctgatggcctgtgacctcacccccgcccctgttcccatccagctccagctgccctgacgccgccccccgactggccttgccttggcctctccacctgccgcccagggcttgggcgggctcttcccagcagctctgcctcttgcagggacctctgtgttcccacgcactcggggcgactctgggctatgatcacctgctttcttctcattattttgctgaaaagaacccctcctctacctcattgctaatggctttttcttactgaggaggggacacctcaggcagaaggccaccctaaactgcccctggcagggtcaaggccccatcctgtctcccccacccccaccgcagccctgtcatgctgcattctggtccttttccatgttcatggctacctcccttggcagtcagggttgggtgtgtggcctcagggctccgaacggcgctgggccagcaggcataccctcacagcggcttccctgctaacaaagtgcctcacgcccatttactacctggcttctgggctgagctccctgcctggctgcagagcattctgcctcaggaggggaaaggggtctgcagagccccttcccaggaccaggcccccatgggtgcccagtggctcccaccttcctaagtctgatttagggagggacttccaagaggtcctgggtcctgccactccacctgctctgaatccagcccttcctcagcccttccatctgaggcccagccactctctgcacacggcccaggccaaccccccagcagggagggagatcaaattcagggctgcagctcgtcccactgcagagggtcagcctcccccacccgcgtcagcagcacaggccgacccccaaatcccacctgaacccaagcaggagtggggtgaacacatgtgcaaaggtgctctgctcaacttaacacagaaggcggcattgtcttcctgcgtcttgccgggcagtctggaagggattctcggtagagccgacgagggcttaccaaattctcagcacagcgagaactcggatgattgatgcggagaaaaacattgttaccagcccctcatctggtttgtattaagaggcttccatgcttggatttttttccccccaaggtaaaaaccagcaatgagttgagaccagagaaataacaggggcacaggcagctgggtgaggggaaccagagctgaaagatgtgacagaggtcggggtaggaagcccctccccactgaggactggcaggaggcagaggcccactgcggcgggtgcccaggagaatcacaccggtgttgataacccgggtgatgctgtgactggcttcctttctcactttattaaagtcacaatagatttggcagcagacaaaagtggctggtcccctccggccctccgctaggcgggcccatcccccatgccccacacctggccctccctaggcagggccaccccccacgccccacgcctggcctcccgtgcctcccgcttcctgcctcacctttccacggcactatcaccgtccaatgtaatgggaggctttcctttttttttgtcttctgtctcccttggggggagccccaagaagatggactccacaccagagtgttgactgagtgaatgaatgatggaccaagtcctactggggtcccccaaccctcacctgggccccaggctcctccttgcaggggtgagagtggggggaggtctgtgtggcttcagctccactagtgggtgtgatctagaggaggccgccccctgcagtggcccctgactggagggggacctctggtacctccctggggtactctctccctcccaggcctggagaaggtgggcaggacttgggaaaattcccacctacaatgaggcaccagtgcatgtgcacccagggtctcgggtcctatcaagtctcctggccttcaaggtcctcaggccctctgtgccccctctccaggcaccctaaaaccaggttacaatgcaagctggctgtgcccagggacaccaagcctgtgccatgctcttcccctgcctacaattacactgagcactttcccacgcagtcagcttctactcagtcctcgggccgagcacccatgccacctcctccaggacgcccacctggtcatgcccctctctgttccttcttgctcccagccctgcctggctctgaagcgtgcttctatttctccatttcagtcctttgcgcttggatatcatcagctcaccctctgacagctcttttagggtcccagcagccagcacagtgcctggtacacagcaagttggctgtgtggctgcgtgaagttggggagtggccggcatggcactccagcacccagcacggcatctagggcagggccgtcaggaagcaaggctggatgaacagaggggtggctgggcccagcgcgatgtcaggactctgcaatgtggggagcaatcaggaggaatctggcacaggtagcgtgtggctgccccaaggattcctcaccagataattataaccccgggttccaagagccacagaggaagtgtggatatgttgcaatgacagcattgaaggcggagtgattcattttgctggggggcatctgttaatgggaccaggctgcccgagaccctgggcagccctgctgctgtgccagcccgttaggccctgtgtgtggcctgcccgctctactcccctggccttgactgaagctgcgtcacttttcttgtccgagggcctttccctgcagcacgcaagcctctcttcctgactctgggccagctatgttgatcttcacttttaacaaaccgaggtgcagaatggcctgacagcagctatctatccaacagtcatgtcccaggccggaatcctcccaaccagggagggaccacttcctacctgacatcaaggacagggccagcgggggtggtctcctggggttgccgaccctgagaaggccaaagccccggggctgctcaggcaggaaagtcacgcttcgcagctccactgactgtccccgcggggtggcacagcactcatgcccagcaagagacacggagacgggcctctgagtgtcaggacgctcacgatgaatgaggtgcagctgcaactggctctggaggtgagcagggggattctggctctagagaaagatctaggtggggagaaagggagcaagaggaggagtgagggagagcaggctcagcctcccgtgctggcagttacctggcggatgaggacggggagcaggaaccacattttctcccgctgtagaagcaaacctttggatgagcaataacgggtgtgcacagtgtgactggtgccttggcgagccttgctggggacctgtctcagcagcctctgcccagggaactgggagctcagtgaaaacagccagcagagaaatgacccccagggctggtgagctgccacaggacccccaggggccagtgaggccgcactcggcccactgtttctttaacaggaaggatgagacagaaaacagcgtctggagtgtgggggagacacgaggtagcagcgcaggccggggcaaggtttggggtcatctggggatctcagattggatcctgctggggacagtgctgatttcttggtgcacagcctctgggctgcattctgtgttccaggctgtttgggactaattgtgcccccccagtttatatgcggaagcccctagtccccattgtgactatatttggagatgaggcctttagagaggcaattaaaataaaatgaggtcataaggcagggccctaaccccgaaggactggcgctcttataagaagaggggaggccagagctctctgtgtctttgccaggtaagaaaacagcagctgcctacaagccaggaagagaggcctcgccggaaatcaactctaatgacaccttggtcttggatgtccagcctccagaacttcgagaaaataactttctgttgttgaaaccacccggtctgtgggattttgttgtggcagccctagcagactaaggcacaggccctaagctagatactttcatcctggcttctctactcagctctcgggcggccctgtgaggggggcatcgtcctcgctgtcctggtctcaccaagaaggtgcaagacttcaagaagctgcaggcggttctgtgactggatcaagtttgcagagctacggcacagttgtcaaaacaccttagcgctttggatcttctctctcttaaaagaagagacagataaaatgaccacttttgaaatttgcaagatgcaaatgctattaaagaaatttaacaaacaaaaagagttcagccaatgaagtgagaacttctgctgaagaatgaacgtggaggagggaagagatgagacaaacccccacgaccttaggtgtttagagcaactgcgcttacaattctcataaggagcaacagttcattgtaaagaggagtttgaattacaatagataaaatatagaagcacagctcctcttgacctcttttcaatacacagcaaagacaaacctctttaccttctctccagagaggaatgctgcacccagctaagagacaagggcgatccgtttctcgtggcctaatagacaatgtaggctaaaaactctggaagatgcattctctttctaagcatgcccctctgagtgcagtggtctgcctgctcaccaggtacaagatgagataaacataactgccccccagggctgctgagaggggagtctccgtctctcacacttgtgtagaaccaggcccagcacgtctgtttgtccatcctcctcacaccgaatattttggggagaaaataatggaattatttcccacttgagaaaagaagagttggcaagctgctctcacataccattgaaaggggaaaatatatgagaacgtcttcagaaggtaactggcaatgtacactccacaatctcaaatgcacatacgctttgatctagcaactccactctgaggaattcatcctcagatatacttccacatatgcacaaaagcatgatgtatgaggagaatcactgcagcgtcacgtttaatagaaaaagactggaaacaattccaatgcccaataatgggaaatgggtgaagtgaattatggcatactcatgcaatgaaactctatgcagcctttaaaaagaatggagcaaaatgaagctataacagtagtaaaaaaaaagctataaatttcttttatgtctgatttgagaaaggccctttatgtatgacacaaacctcagaggccataaaagactgataaatgggaatatattgaaaatttttttcatgatgcaaacacaaaaccccccaaagtagttaaaagtataaaactatgagaaaatatttccaacccacatgaaaacttccttaaaacattcctagcaatcggtgaggaagatgtgaatagccaaaagaagagtgaaccaaggataggactgggccatttgccgaaaaggaaacgtaagtttctctgagacatacccaagtcacctttagtcatagagaatcgcaaatgacctcttccctgggacgcagcttctcctctcttaggataaagtagtaacatgaaatagtacccacttcctgggaagcacatcctcagctgcacagaggaggccagggtgtgggtgacatctctccgtggatgggaatcagcgctgtatcatcacagacgcttggacccagcaggtctacatctaggaatttatccctcccatgcactcaccccagtgtcatttaacgcagccattcaaaaaaaactaggacattccatgcgggagacaaaacatctcagatagaccacgatgtagaaacaagagacaaaactgtgtatgttgtgctaccgttgagttaaaaaaaaaaaaaaaccaaaaaaaccccaacaaaaaacagggagaaaagactggatttacatatgtgtttgtttgcatgagcctaaaacaccctgcccgggaggcaggggtgattggcacccaggcaaggcagtgtggttgctgaaggacaggggtggttgggacttttcccactggatactgttttataccatttgaatcttttttttttcagttttataattcttttcccctatttttattgaagtataattggcaaataaaaatggtattgcttgactgattgactgggatagggtcttcctatgttgcccaggctggagtgcaatcgtgatcatagctcacagcagcctccaactcctgggctcaagtgatctttctgcctcagcctcgaaaatagctgcgactacaggcacatgccaccatgccctgctaattttttttactttctgtagagacagggttttctcatgtgatatggtttggatctgtgtccccactcaagtctcctgttcaactgtaatcctcagtgttggaggtggggcttggtgggaggtgactggatcatgggggtggttttaatggtttaacaccatcctctgggtgctgttctcatgacagtgactgagttctcgtgcgatctggctgtttaaaaatgtgtagcacttcacccttcgctgtctctctctcctgctctgccatgtgaagatgtgcctgcttccccttcaccatccaccatgattgtaagtttcctgaggcctccccagaagcagaagccactatgcttcccgtacagactgtgaaaacgcgagccaattaaaccctcttttctttaggttgggtgtggtggctcatgcctgtaatcctagcactttgggaggccgaggcagatggattgcctgagctcaggagttcgaaaccagcctgggcaatacggtgaaaccccgtctctagtaaaaatacaaaaaattagttgggcatggtggtgtgagcctgtggtcccagctactcgggaggctgaagcaggagaatcgcttgaaaccgggaggcggaggttgcagtgagtggagatcatagcaccgtactccagcctgggagacaggtgagactttgtctcaaaaaaaaaaaaaaatggatttttaaaatgcagaatagtaactgtttacatagcatttacatcatattaggcattataagtaatctagagatgacttaaagcatatggaggatgtgtattggttatatgcaaatactacacattttaccaggaattcaaggctgcagtgagctaggatcacaccactgctctccagtctgggccacaaagaacctcaaataaaataagataaataaaataaataaacaagcattttatatcaaggacttgagcagtccagatttgggtatctgcaggggggtcctggagccaatcccccatggatattaaggcacaacgctatacagatatggaaacattaagtcatacatctaaaatagatgcagttttccagcctgggttacatagtatattagtctgttctcgcattgctataaagaactaccgaaggctgagtaatttataaagaaaagaggtttgtttttatttttttggagacagagtcttgctctgttgcccaggctggagtgcagtggtgcgatctcggctcactgcaaccgccgcctcctgggttcaaacaattctcctgcctcagcctcccgagtagctgggaccacaggctcacgccgccaaggatgttagccagaatggtctccatctcctgacctcatgatccgcccgcctcggcctcccaaagtgctgggaatacaggcttgtttgtatttttttctgaattttttttgatctgtgtttagctgaatccacagatgcagagctgcaggttcagagggctgactgcgtattgcgaaatgattgacagcactgagctagtgaacatgttcaccaacttgtgcagtgattataccacttgaatgttgagtgagcaaatatcttacctattaaaattaatacagtaaaataaaaagactgaggcagatttctatttcctgatatgggatgatttccaagatttcttgaagtataaaacgcaaggtgctgagcacgctgcagcatggatgaagcttgaaatggtgctcagtgacagacgcaggcacagaagaccccaggcttagggccccactctaagaaatgtccagaataggcaaagccacagagacgggaagcagaggagtggccgcctggggttgcggaggggaggaggacagccaatgggtacaggacttcttttagggtgacgatcatggtctaaagttgattgtgatgctggctgcacaattctgaacacactgaaaaccacgagtggtgcactttaaacagctggagtctgcggtctgtgaactgtatatcaataaagctgttatgaaaaaaggcaaggcgcagcacagggggtaaagcattccacagcttgtttaaaagagggggcatttgtttgaggtatgtctggggagaaccagaagacaccaggatcgactgcctcaggagaggggcctgagccctggaggcaggggtgggaggaggcattctgcctcaggaatgcattccttcttcccagaaagagaaaggcagggtgcaaagggttaagggagagaaggcgagacacaggaaaaaaaaggcaaaggaaagcaaaagtcagcgcctccccagtccccacattaaagtagccattgccgccggagcagagccggcttggctgcctgaggaggaggcacgcgccaaacccagcagagtgatgcctgggcaggagttacgcaccctcccccggccgcctggcaccgagattggctatgcagcaggaggagatgccagggctccgagcctcaggaaccctggtgctggtccccactgcaaccccctggggtctgcgcactgagcctctccaacccagcacacccgtgcccacctctccagataattagagatgctgcataaaaaaaagtctaacacaaagcctgacgctcgtggatgctcaacaaaagttaggctggccttttccaaacagtgcttcgagtcaaatgcaagtattgtctaaagtctgcagaagaaaggaaaatgaacggagctaaagatgtacttccctttactcgatgctgttctcctgttcccttctgttctttcagtatctaattgcattaagcacgggttccctccctggtgacctggggcttcccagcaggaagtgaccttgagggcgcctgcccagtgacctgctttctgaagtgccgggtagtgcatcccctcagatggtgacctccttcccttctcacaggcttctggtctgtccacgccctcaggagaatgccttttctgtgagccggcggaagtgcctctgccccctggggtcggggggtcagcttggctgcagggctggggccgcacagcctcgactcagagaactcacaatgaaatcaggccgggcatgcaggctcttgctgggaacagcacactggggaactgtgcgcctttgaggttttaaccgtccgctggggaaacaagtgagttctttgaaggaaaacatattttggaatctgctctgaatgataccaagaggcaggcggcctccaggggccagcctttgactctaggctgatgggtatcacccttgctttcacatgtttgtcccaaatataaaggaatttacccatcagctgaaattttcagttgttattttgcttaatgtcaggtcagatttaaaatgtgtgtatgtgtgtgtgtgtgtgtgtatgtacgtgtatgtgtgtgtgtacgtgtatgtatgtgtgtatgtgtatgtgtgtgtgtatgtgtgtgtgtatgtgtgtatgtgtgtttatgtgtatgtgtgtgtatgtctaatgtgtatgtgtatgtatatgtgtgtgcatgtgtacgtgtgtgtgtatgtgtgtctaatgtgtgtgtatgtgtatgtgtgtatgtgtatgtatgtgtgtgtatgtatatgtgtgtatgtgtatgtgtatatatgtgtgtatgcgtgtgtgtatatgtatgtgtgtgtatgtgtgtgtatgcgtatgtgtatgtgtatgtatgtctaatgtatgtgtattgtgtgtatgtgtatgtacgtgtgtaggtctaatgtgtgtgtatgtgtatgtgtacgtgtgtacgtctaatgtgtgtgtatgtgtatgtgtgtatgtctaatgtgtatgtgtatgtatgtgtatgtgtgtgcatgtgtacgtgtgtatgtgtgtctaatgtgtgtatgtgtgtatgtgtatgtgtgtgtatgtatatgtgtgtatatgtgtgtatgcgtgtgcgtatatgtatgtatgtatgtgtgtgtatgtgtatgtgtatgtatgtctaatgtgtgtattgtgtgtatgtgtatgtgtacgtgtgtatgtctaatgtgtgtatgtgtatgtgtatgtgtgtatgtgtatgtgtgtgtatgtgtatgtgtgtatgtgtgtatatgtatgcgtatgtgtatgtgcgtatgcgtatatatgtgtgtgtatgcgtgtatatgtgtgtatgtgtgtatgtatgtctagtgtgtgtatgtgtgtgtatgtgtacgtgtgtatgtctaatgtgtatgtgtatgtgtgtgtatgtgtatgtgtgtatgcgtgtatgtatgtgtgtatgtgtctagtgtgtgtgtgtatgtgtacgtgtgtatgtgtctaatgtgtatgtgtatgtgtgtgtatgtatgtgtatgtgtgtatgtgtgtatgtgtatgtgtgtatgtgtatctgtgtgtgtatctgtgtgtgtgtatgtgtgtgtatgtgtatgtgtgtaaacatgatatacccatgtgtgatttgtatataagcccccactcatataaaatctgcacctatatattaaatgcctgtttataaaggttcctgtgaaaacaatttaaaaataaagggagaaaatgatccagattccatcacctttacatgactgtagttaatatttggtgtaaatttttgttcagaaccagatgtcaaatccaactgtctaataaaaggcttctgatttgctttggaagaggaaagggtgatctataaagacagaaagcacagagtcgcaggatggcagctctccaggctgaaaggggcttgggggtctggctcagttttgattctggcactgcagtaaatattcatgcaaccctgggcaagtcatttaacctctctcagcctcggtttccaccaacaccccacttctgggttgctgccaagacgaaataagatagtgaagggggctgggtgcagtggctcacgcctgtaatcccagcactttgggaggccgaggcaggtggatcacttgagatcaggagtttgagaccagcctggccaacaatggtgacatcccgtttctactaaaaacacacaaaaaattagctggatgtggtggtgggtgcctgcaatcccagctacttgggaagctgaggcaggagaattgcttgaacccgggaggtggagtttgcagtgagctgagatcacaccactgcactctagcctgggtgacagagcgaaactcttgtctcaaaaaaaagatcatgaagggactgtcatggcccctgtcagagtgcaggttgctcataagtgttcattttccttgtctggttaaataaaaagattcccgagagaggtgtggagtgaaaacccagtctacatttctctcctgctgcacgctggctctgtatgtccagcaaatgttcacttagtaaagtcgcagagctcagatcttgtgtgcaaagcccaagctgggagggggcccaggccacttctttgaagggaaaggaggacagacagaaactcagaaatagcctatttctagggagaagatggagcaggactgggatggctcccagaaactaagcatcttcctcaagggtgaagggagagggagcagaggagcccagtggagaacgaggagggctgcagaggaggtccgtggagcaggggtggggttaagggtgagcttacgggagcggaaaagcttttcctgaggccagagcctcgggtgagacaagcagccgctcgcatcataggtctttgggggcaactcccaccccacaattctcttccgtggtcccataagcttctcaaatgtcctgggatgccagcctgctgacatgcgaaccacatctccagggatagcctctcctgcccagaagtggccccaaattcttcgccagaccaagcacagagatttctcggttggccccaaattctttatcagaccaagtgtagggatttctcagttgcgaaaacctagtcactgaatttcacagaaagtagaataagaatagaaactgcgaagctttttttcaaggaaagtacgtttctttattagattgcaaaatcttttcccagcggggacaggtcaatttaaagtggcggcagccctgcaaggatgacgcacacatccagggagaagctgccatgggaaccgcatgctcctggggagccaggctgggcctcatgtggggggggatggagggctgcagtcgtgcctaggggcctgcccggcaaagagcaggagaactgaccgcacacagatctgtgttcaaatccctcactagactgccagatgcagaactgttggcaaacacctctctgagcctcggtgtccccaccttaaaagtgagaattacacctccctatttgggtcatgaaacataatatgtttcgaatgagaaacatactagaaacttgcatggcacacctggtcatggagtgttcaggaggtgttgtcctcatcccacacggagcaggtgcaccggctgctgctatacttctgctgtgacatccttcagggaaccgggggacccaaagagctccacgtccctgggcgggccaacagagccaatgtgatgggagagaaatgctacgcacctggggcttaacctcgagcagctgtgtgggctttatcaggccaacacgacgctgaagaacaacagaagacgtttttgacattcggctttggacttggcaaacagggctggactgaacacgtctcagggacacactctggccacatccttgctacatccaagcaaaggctgcctggagctgctgtcagggtctttgctgggtctctagctattcttgtgccactcacaccatgtttttaaaaaacattttttctttaaactttcttacttaaataaaatatattttaaaatgaaacctaaattactaccacaaaaggaaaaccactcttccctgccataaggtctattctgtttgtcaaaaaggaaattgacaagtattaaaggagtgttaaagaggcactagggacaaactgagacgatctcttgagtcagctggaaggattgggagagatctgaaggcttttctcctgtggagtcacttgtctttgagtgaatattgggttaaggctttcgagcccttgctctgaggaatgatcttggtgtgaatgtgggcacatgtggcctgaggagggtagaagctgatgctcttagagtctcgctctcctcatgtctcctcaccattcctctgcgggctccacctccctcctacagggcccttctccccacctccaccttcaacccaacccctggccccctggccttgtctccatcatacacccccctacaggactcatgttttcctactgcctccaccagaacctctgcacagcacattcccaccatcactaccaccccaaccctgacggctcccaattcttctcctgggatcaccgactccatgctggacctgtgaccccttgggaaccgcagtcacctccaagacaggtgctttccctatgtgtgcttgagccatgcaccggctctcactgtctcctgctgcagatgagctaagtaaggtccagcaagaccagtcagcaggcgggcaggctccacatcctgacattcccgcctcccctccagggattttccaccatctcactctggaactctgtctccaaaccacaagctgacatcacacagggagtcactggacgccccctaggaaatgctgagtgggagataaaggagtagtgatgcttatgcaaagcttccctcctcccctcctgcagatacggggtcattgttacaagcaacaaggaggcttcctaggtccaacttttagcggacgtcgctgcaggtgtggcagggcattgaggtgggaacacattcagctggtgagaggtggtgtgcagagcggctcctcctgtccctgcctgtgaactgttagacagacacaccattcccatttccacccagagcccaagtgaatggagggaggctgagtttggagccaggcggctgtgggtccgaatagcggctcaaccacaggccccggggttggtgggggcatgtcccactgaaccatggacagctctgtgtctcagtgggcccacagcacgacaccagcctctgggctgataccgaatccaggctaagctcacttcaccgaggggtgcctgtggcctgccaagcagccactctctcttttttttgccaccagcacctcacttttcctttgaagagccaccctccccactctcagtccacctggatttgttaagtcttagcctctcccacccacccttgccaccggcaggtgactctggcctggctcacgggcacaccctcatttttctggctgcaatgactggctcagagtgtaaaatgtcacccaggagtctccgccatgggacttctgttggaactattagacaagaggctttcttcctgcagctgcaagaaaggagtaaggctagaactttgaagactccacttcctgaaggtgaagccggcacagaggaaagcatcccaagcactgggagaggctgcccgatggcacagcccagcccatggcacagcccagcagcccgacccaccctacagaagccaaatctatgacacatccacccccacagcaacccacccccacagcaacccacccccacagcaacccacccccacagcaatccactcccacagcaacccacccccacagcaacccacccccacagcaacccacccccacagcaacccacccccacagcaatccactcccacagcaacccactcccacagcaaccccacatattttgttttgttttgttttttggctttaagtcaattcaagttggctgtttttatgacaagcaacagtgtcctaacaggtgtgagcagtatttttagggagtcagacaacataactgcggggcactaagcatcagcccatgccctagagttacagtgtatcaaggttttatcacatgttaattctggcctctcctataggacctatcatcctcttgttatctgctaatttgatcactgtatacattttgcatctccaagttgttgaaaacactgacaggatagcctaagtgtagaacctacagtccagaagaagaaatacctcctggctgacacagtgcactcactcattcactgattcactcactccttcattcattcagtatctattgagtcctactacgggtcagtcatagttctaattagacttgtgtgactattaaccaaccagctacactcccagccagactctggtcccaaatgtctccttttcagacaaaaacacattaggacgttttggtcagcacccatatgaagtccaaatacactggaattaaacactccctcgacccacagtcccacaggagcgccccgtcactcggccacagagccgatggctgcttcacctccccaccggctgtgggtgtcggctgcaggtctgacactggctcactgcgctagagtttcccgaatccatccctctggaaactggcatggttctgatggcctatccatcaccctctgttcttcctcaaagacacagcctatttctatgatcacattagcaagtcctttccacactctggcacaacccatctgggtgtggacacgtaggttcacgtaatgggatttgtcacacgtggtcagcacctgctatgtgggagaacctcctagaacctccccacacacccttcgctttgcggccctcctgactgttccccatcagacccctccacctgaggtaaaagtggcaatccaggactcaaggcaccagtggtctggctaccacctcggtcccgccccgggtcacatggggagctcttctttgatcttgtgccacatggacatttaaagccgcgtgtgcttttctgcacatttccgcctgttggtttctgggcccctccctggctttgtttccctccctcccgcctaagcccacgtcccttgtaagtctgagaagaaagctccacacatggccagaactgcctggcccccgccccttacaggaagtccgtcttcttccttcttcctcctgatatctgcttgcctcatttctaggttttgaatctcttggtttgggattggcagctccaggcccccaggagggtgagctgagggtgaagcaggcccacaggagggtgagctgagggtggagcaggcccacaggtggggcccgcctgtgcagagagtactcagccttggtcccctgagatgcaggagcttgttcatctggtggagttgaggccatgatcatccctcacgggccgtcttcctaaggctatctgatcctgcctctcccatctccaacatcagcagacaccgaattatagttctagaagggtggtcggggaggcgcctgggaactcacccggcccagcagttgcacctttgattagcagaatcacccggacagcttttcctgtccccactccagaggctctgagtcacgaggtcttgggtgggcctaaggcacctggatctacaaaaagtgcccccatcccccatgactctgctgatgaactgcacaggggctccccctcacctatggggaagccggcaccttgcaggtttcagggcacactgcagggagcctgcccaggccccagcctccagcaggcacagccagcatttccagtgcctggggctgaactggcttggaagcctgggctccgagctgctcactcacaaccctcgccaatacagcctgaatttattaagcaatgggctcttcctgtcaggcgaataaacagatgcacaagcagatacagcagtaaagaataaaccgtaggggcaataacaatctctttgtaatttctctttggggtgggctttatgatgttgctgtgtgtgcgtgtgtgtgtgtgtgtgtgtgtgtgtgtgtgtgtgataaataagcaaaattgttttcctgggactccatccaggaacattagatatggggtccagccccagcgcacaggaaaccctgctcaggcagatggtgtgggagagcgaggttgtgctttgatgcatggggtagaggaaccctaggaggcactgagacctcggtggctgtcccaggctctgtcctccctgcatatggcctcaggcagctcaaggcttagcttcccactggcctcctccctcccggacactcacgcatttcaggtctgacgggtacccgccacccaatccctctttcttttgacgggtacccgccacccaatccctctttcttctgatgtcgacaggatcaagcacaagcctccttggcagggatgaggggtcctcaggtctggctgggcccacctggctgcttcctggtctctaccacatgccccagcctcaccccacggcccgcccagcacccgccaggcatgcagtggcccctctcttctcctcgacaactgcgtgctgttcccggcagacccttgcgtttcctgttctctgcctggaaagccatgtcttgttctccacgcccagttctgatgtcacctttctcacacccaggagtcctctgtgacctgggagggggcccactccccctaccctcagcgctgggcactggcttgtgatggtctcctggccacatggggagctcctcgagggcaaggcctgggaacatctggagtcagtgaacacagcaggaaggggggatggtcaagcgcaccacaggcttggaagcagacacgcccagttcaagccccactccagccctcctcaagtgggtcactcctcacggcctgtgagttcacctcttcatctgagctcgcttcagatgacgcccccagtgccaggtgatcatctgccgctgtgtcctcagcatctggcccagccccatggggaccatctgttaaagctccatctaccctacgaggaggcgagtccccaagggcagggctgggtctgattcacctcttcctccccggagcccagggttcactctgcaactctgctggctgaagggcctgctcccagcccagcttggctgtccagtggggaggggcaccgctgccttgcccgaggttccctctgcaccccacgatgggcgctgcgtcctccatcctctggtgcaccaggttagcttgactccaggtgccctgctggtgtggctccacctggtcgctggggtctgtcttcccagctcccatccgcccttccctgcatcctcctgggctggttccagtttggggccatcatctcttgtgcatctttgctcacggcgtcttctgcacctgcactcccatctgacctttccagaccaacttccaccctgccccaacagagtgctttcagatcacccgccctgcgaaaatgtgtcggtgatcactgtgactagaacaagtcctcgtgtctctctatgtgagcccccaacccactctccagctacccctagaaccaaaacagcatcctgccgctgccacggtggtgcagccacactgagcatcccaaacctcgccggaagcacgttcctcctccgtgcctgtgcttctgctggtctaaatcattatctattgctgaggctcacagcagatgtcgcctcttccataaaagcttttctgactccttcacccaggaagcagggtcctgccctcctctgcagccccacgtggcccacttggcatgagtggctggcttgctcgccttcctggccacaccagatgggctgtgctttcttcacctctgcattccaggtgtctcctacggacctggaatggggtggtcatttggtgcgtgtttgttgaaactgaattttacatggcagggatttcagactcttctctggttgggttttgggctgactgctgaacagtccatttgctatcagacaaaattcagttgcggtcacgtcagacatttcctttagccaaatcgttatctgagggtatcactggaatacacatcagcactagcttgatctgcttggaaaccaccaatggcatccgctccgagtcttccgatgatgtccagatgggagctgctgcgcttagtgcattttctatcattaagctgacgggagctccacgtctgagaggggcgtttggccttgggtgggtcacgcctctctgtgtgcccgtttctcctctggagcggcaagaagcagcagccagagtatcagcaaggtcccatggaaggtggagtgatctccattttgctaatgcaaagcacccttggcagtcagtgtcctgcacatttatacagagctccaagcccactgtggtagactggggcttcccttggtggctgcaacatctggcctcaccaccgtgttgaatggaggagaccctaggtgaacactaggtcccactgtacgagccgggagccctgacatgttagggaggctgggggcggggtcaaaccaaggacgagcaggctgcagagggcccatgggattctgctgctgaacagatgcaggctgccatcgtacaatgtggctctcttttctttctagcatatcatccaaacgcctacttcccacttctgggaacttctcgctcccagattcagaaactgtcctggggcaccagcaggtgggtgcgcaggtacacgtgagtccaggcttcccagaggtacgggctgccacccttcaggccgtggcctgggtcaggcgctgtggagagtggagcaggatgagaccagctgctgtcctggaggggctcagggctgggccaggtggcaggacctgggaggcacccaggagagctgctctaagggagacgttgtgtgcactgcggaaatgcacggggccagtggcgcatggaggggcagggaaggactgatcagaaaggctgtgtgtgagcagagccttgaagggagggaggattttgatgcgtcgaaagggcaggcaagaaacagctctgggaagagctcagtctgtctggatcaacttgttttgtctagaactttccatgtgtgaaaggcaacatgggaaataaattcctcatggctaggacatgggttaagggggaggaataccatgggctgggcagggaggagctaccatagtgtttctaaagaagactttatggtttcaaagcagtcttaggctcacagcaaaatagagtggaaagtgcagagagttcccatatcccctcagcccacaaacgcacagcctcccccatgatcagcatccccaccagagggtacgtctgtcggctgatgaacccacactgacgagtcatcacccacattccatagtgtacgttagggttcactcttggtagcatacatcctgtgggtttggacgactgtgtaatgacacgtagccaccgctatagtatcacacggagtagttccactgccctaaaagtagtctaagctccatccatatacctctccctccccacaccatagtgacttgagcaggggaagagtggggccaagcctggcctccagaagccatcggcctccagaagccgtcagcctccagaagccgtcagcctccagtccagagtggcacagccagcaagcttcacagcgacttccttccaggaggaccaggtgcagctagcactgctgcaagccaagtaggacaccaacccctttttattgttcctgggctataaggtcacggacttgctttccccctcctgactgattcctgctggctccagggcagatatgcccacgtccctgcaccccgagggctgctcctcatggcagcaaagcccagccagggcagcctgagatggggttgggggagacaaggaaatgaatgactgctcagtgtgtgtgccccttcaaggtttagcaagctccccgcacacccaccttcttgacccagccagaggtgaggaccttaggctgcatccgtcggccccttctgccctggggtgggaggccgaagctattcagtgcgggtcaggagggacagcatcagtcatgtgagcacagctaggcaggcctcagggaggctggcttggtaggtgtgtatcttgtcctgtccaggggagacgaacaggtctggggccctaaacaccttgacccctggagagatgaagtgttcccccccacaccaccctcctgtccttgttcagactcctctggctccaattccagctcccaggaaacttcacacctcgagaggatgtgacctgggttaaggtgatggccttctggaaactggaagagaacacccctccatggcaggtaacaagagacgcttcatcttcaagtcttttcttctgtccagaaagcactcagagaaattacaataataaagttagtccattatatggtttggctgtatccccacccaaatctcatcttgaattgaacgtgttgtggaagggacccagtgggaggtaattgaatcatgggggcaggtcattctcgtgctgttcttgtgacagtgaataagtctcctgagatctgatggttttataaggggagtttccctgcacacgctcctctctctttgcttgctgccatccatgtaagatgtgacttgctcctccttgccttctgccatgattgtaaggcccccccagccaggtggaactgtaagtccattaaatctctttcttttgtaaactgcccagtctcaggtatgtctttatcatcagcatgagaacagactaacacagttcagcagggtagaatgaaaaggaggcacaaaacaagggttgaaacaaatgaccatgccacgggccaggatttaagaggcaagaccttaggttccaggcccttctagatgtggcccgaagtactgagtcacgttaatgtggaacccagctggaggaaccactgagggcacatgcagaatagcacccaaccagcacctaggaaaagggcagccagttccagaactaaggccagcaccaaattcatgccacgtgtctgcacggcaggttcccataatcaatgtcacttatgcatgaccctcttgagatgtgcagtctggatggaatcaaaggactcacaaaaggttttgaaaagagcatgctggggagagtgcaaagccaggccgctggcctgcaggtcctgggcgtgcttcttcacccttgtgtttaaaatgtcaaaggaataaagagatgtggtgtatacacaatggaatactatccagccttacaaaaggaggaaatcctgtcatttgagacaatatgtgtgaacctggaagacatgacgctaagtgaaataagccaggcacagaaagacaaacaccacatgatctcactgatatgtggaatctaaaaaaaaaatagagctcatggaagcagagaggcttcagaaacttggcggcaggggattgggggacattggccaacggatatagagtttcattagacagggggaagaaattcaagagagctactgtccacagggcaaggtggctcacctttgtaatcccagcactttgggaggtccaggcaggaagatgggttgcacccaggagatcagcctgggtaacacggtgagaccctatctctcttgaaaaataaaatgttgaataataaaattattcaatctagtccatcctaaatttgcttaaaaggaaaaaaatattaaaataaataaacaaataaatattagcccagcgtggtggtgtgcacctgcagtcccagctactcaagaggctgaggcaggaggatcccttgagcccaggaggtcaaggttgcagtgagccgtgatcacataactgcactccagcctgtgtgacagagtgtgaccctgtctcacaaagaaaagatctattgtataacatgatgactgtggttaataacaaggttttgtattcttgaaaattgctaagaatagatcttaagtgttctcattacaaaaaaatgctaagtccatgagctaatggatgttcatgaggttgacgtctctctctgccatgtagacatgtatcagaaacatcatgccgcacaccatatagacaatgtttgtcaattaaaaataaatacataataaatacatataaaatgccaaaggaaaaatgttctgtgcagaattgatgaggagttagaccctgaaacgcacatccaaatatctccacttccctatcctacatgggttcgaccagtgtcaccaggcagcaccccaggcctagagggtgagaggctgtgtgcactcagactatggccccagttgactctcaaatcctcacatgcaggcatgccccagcagggaggacgactggaggaggggccggctgcagctctggggtcggatgggcctcgcgggcttggttccagctgagactccgccagtcccacctcaaagtcgcccctacaccttggctgagctacctgaccttggtatcagccctgaacactggacacgcggcgacgggcctgagcctccctcaggggcactgtcaccaacccctgggccaaatgacctttgtggcgccctgcctggctcacagctcacccaccccgcacaccctggggattgcacagttctccctcctgtgacagggcagccctgtccgcggtccctcttcccgatggtgagcttcccaccaatgtagaagcgccttcccttcctgtcatctactctcggccacccagctgagcccccaccgccccagggggctccacggagtgaatctgagggcggaaatgtttctaagcattcattttctagctgttgccaactagagtgaaatccttctgactcagcttgaactacagctctgaaatctaacaagttagttaagaaggattttagaaaagaaaaattgagcctggccaagtctgcgataggaaatccaggatcctttctagattagaggctgcacagtgacagccgtgacccacagatgttttgtctggtctgcagagtgttttaaaacacgggaactcatagcccagagttaaaaatcaggcaatttcacacacaactctggatttctggttcctctggaagaaataaggtgatggggcagcaggggtgactccaaagacggggctgacgcagggggctggcagacagcggggcgtgctgggaggcacttcgagagagtgttgcccaggagagtggtgctgggctccgatgtggctgggagctggcacaatttatacacttggcaggagcgccgtttcctccaggttttctgtttcttattaaagtttttagtccgagggcgtagttgctgactctggtgttggcgttagccctggccttattaaacagaaatatacagccaagaggaaatgaagaaggaaggacagacgatgccaaagggaaaaaacagggctggagaaccaaagcagcgtccacaggaacgaaatcctggggggcgggggctgcggtccctgcaaggggagagggtgaggtggagagtgacagcccagcttccgatttcttttttcctttttccagacaaagtctctctctattggccaggctggagtgcagtggtgaggtcacagctcattgcagcctcgacctcccagcctcaagccaccctcccgtctcagcctcccgtgtagctgggaccacaggcacccaccaccacacctggctaattttttttgcatttttagtagagacagggtttcgccatgttgcccaggctggtctcaaactcttgggcttaagtgatctgcctgtctctgcctcccaaagtactgggattacaggcgtgagccaccgcgcccagcccccagcttcagagatttctctttcttttctttttctttctttctctttttctttctttttttttttttttttgagacagagtcttgctctgtcacccaggctggagtgcagtgtgcaatcccggctcactgcaacctccatctcccaggttcaagcgattctcctgcctcagcctcccgagtacagcttcagatttctgagaagaaactaacactatgagtactgccagagtaagaaatcaaacccttggtaaaaagcacaggcttaacaagaccccaaaacactgacatgggtttgactgccactcaccagctggccttgtgcccttggacccccactgggtttggtgcctctcctggccttggttttctcagctataaaatgggcacagcagcagtaacaccacagggttgccatggctgtgagatgggcacaggacaagggcagcgccctcgtttgggttccgcagaactgactgccgttctcagtgcagcccaggcgcgaacctccaaggtgtcctgccccacactttattttttatttttatttttattttttgagacagactctccctctgttgcccaaggctggagtgcagtggtgcaatctcggctcactgcaacctccgcctcccaggttcaagtgattctcctgcctcagcctcccaagtagctgggactacaggctcctgccatcagcccagctactttttttatttttagtagagacgggatttcaccatgttggccaggctggtcacaaactcctgacctcaggtgatccgcctgcctcagcctcccaaagtgctgggattacaggtgtgagccaccgtccttggccctgccgtgcactttaacctgaagagatgaatctggacaaaacccagttgctggcataatcctgacatgctgctcaccctgtttcctcccatcctcgtcccagggggctgcctccctcaggagaggtgggtgccgaagttgtcaccaggcaccgtgtggcagagcagggcagtcagagctcgctttgaacatatctgggcagggcctcgcctgaggagagcagggcaggcacgagtggggccggaggggaagtgcagcaccggcgcccgcacccttcaacttctcagttttctctgtcggttgatttggacgcgttctcacaggtcatatgcacctttgagtccaattttactcacaaggatgcgcaagggtacaattctcagcacacgccagcttctaccaagatggagacagtggatctaaggctatctgctgaatagatcacagagtaatgagtacattaatggtggcagcaagggcatggctgatgctccgtgataacctgagccaatctttgctcctcccagcctctgcacacccttccctctgcaacccttctatccctgaggtgcccttccctccacctctctccactgcacaaactcttcctctcccttccaggcccagttcaacagtcacttccttgacgcctcataatggtcaccactgcctgcctatctctgctgctgcccttaccacagacaccgtggacagcagctcgtggctgtgccccccacgcctccgtaaggtttttgagtgcggttaaaatcatgggcttgggaaccagactgcctgggtttgcattccagctctgccacctgtgacttctctgtgcctcagtttcctcatccgtgaaatgagaacagcacctacctcactgggctgctgtaagagtttagatgagtgaaggtgttgtcagtgtccagctttagtaagcgctgaaaacctgttagttaaaaccacttcccacctgctaggatggctgcaatcaaaagtcagataataacaggtgttggtgcaacgtggcacgactggaaccctcatacatggctggtgggaacgtgaaatggtgcagccactttggaagccagtctggcagcttaatcaaacagctaagcacagagttaccctgagactcagaaattccactcctcgaggcatcaggagtcaaattattgaataaccccaataaccaataacccataatcaagtagccaaagagaaatgaaaacatatatccagaaaaagtttgcacacaaatgttcatagaagcatacgtataacagccaaaaggtggcgacaaccgaaatcaccgtcagctgatgaacggatgaagacaatgtggttgatctgaacaccagaatatcactctgccatcgaaagctgcaacatgctacctgccacaacatggacgaaccttgaaaacatgatgggaagtgacatgaaccacagaaggtcacacgctgcaggagtccatttctaggaaatgtccagaatgaacaaatccacagggacagaaagtagactcgtggttggcaggggctgggggagaggaggggaggtgggggataatagctacagggcatgggctttcttccgcaggggatgaaaaggtcctaaaacggacatctctcccctggattctccaaaccctaccgactgcctccaggcaccaccttgccctgcatcctgtcttccgcatggcagccagggtgaccctgtaagaacctaaatcagaacttggcctttctctcggaaccctgcaatgactttctgtctcacacagagtcgatggtctcacctcacgatggcccaaaaggccctgcgtggtcccgccctgcccctccgacagcctcgttcctgctttcccgtcttacttctctcccaccttgctgacctcagtctcaccaggcaaacgcttgctcactgaggtggcccctgtgctggatccccgtctccaccagaaatccacttgacccattcccttttctttctttcttttttcttttttgagacggagtctgcctctgttgcccaggctggagtgcagtggcacaatcttggctcactgaaacctccgcctcccaggttcaagtgattcttctgcctcagtctcccgagtagctgggattataggcgcctgccaccatgtctggctaatttttgtatttttagtagagacagggtttcaccatgttggccagctggtctcgaactactgacctcaagtgatctgcccgcctcggcctccaaaagtgttgggattataggcgtgagccaccacgcccggctcccattcccttttctacagctgtaagttgtggctcaaatgtcttcctcccagggggacccctggccctgcctccctactctatttaatatcccactctgcacacgccacatcccagtgtgatgaaggcacagtctcatctgtgctttctcttttccatagcacttgtcatcttctaaagtactacagggcatgcttattatattcatgatttgtctgtccccttgctaaacgggcatgccatcggatccgggtttccgtctgttttgttatttaggtattctctgctattggttggtgctcggtgaacatgtgagaaggaactctgtcttcacatctctgagaagtaggtattatcatttccgtttctcaggtgggacatgatggctcagagaggttaggtgacctgccccagggaccacagctgggacagggagttgggtgtgaggccccccactgcctggtgctggggagaccccctgcactgcattggtgcccctggtcttctagacaaagggcagcagatgaccatagctgctctttaggaaccaggcactgagttaggtgctttagatacaccacctgtaattctcaagcaatcctgcaagttaggcctcttacttccatttaatagaagagaaatcggaagctctgaaaggtgagggaacatgcccaaggccacacagctaggagacagtggaaccagatgcttctttgtgtaaggggtgcaagcttccacatgcagctgagaccctccgccatctgcaaggcgaaagtcatgccctgtttactgccaagataagcactgctggggacaaaagtgccaaggaggctaaattagggcttagcaggacaggagtgaaagggaaatagcaaaaggctgcctcccatgacttcatcaaagtgaaccctggccacttttatcttcccccgaaaaggctgataaatgcacaaaagccctccctcccctcggcacaccaggaaccacagaaactggactactcatcacctcttgaaggggtcaccggctggaggatgtctcaaggacaaatgcgatgccccgcagcctgtttcatggggtctgacagggagccggttgcagattgatgggactacgcgggccacgcacaggaaagcgtctgagtcagcagtgggcagcgggtaggaaccagcatccacccagcagagctatgattaacgtaattccaacagatcttctcccgtaacgggctggtgtttcacatctgtcagacacagagctgcctcccctgaacatgccatgtctttccttcctggctgtgcaaaggcagtgtgttcctccttccttttccaagggaaggcatgaactgcctggtgttttaagaagtgaaattctggccctcatctccaggggccggggccaccccactgcttctggagaatcagcccaaggcattcggcagtcagtcccgacatgggtctacccaaactcactagtgaaaactcaccacacagccagacgtgtcatcctgggccttttgccttttcttcaccctctgccaccggccatgtgtcctaggatcctcaagcctaacttccctgggtgcaattccccatcccaaccccatctccaaggcggtgccatcctcccctggaccttcgatcttcaggggtgtgggaagccatgggagtggcgtggaggtggtgtggacaagcgcgcgagtcacggtcacagtctgtcaccgggaggccgagagagcaggtgcagggcaggccgaggggactcctgcgtagaggtggccagtggaaggcgctttaggggctggtgagccatcctgtgtgtgtggcaggagctggggcccacgacacacggtggagaagacactggagaagcaggcaggggtcattgggagaagggatttactcaagagccacagtgtgccaagcacgatggcacgtgtctgtgttcctagccactcaggaggctgaggcaggaggatcggtgagcccacgagctccgggctgaagtgcacaatgctgactgagtgtgcacagtaagtttggcatcaatatggtgacctcccaggagaaggggaccaccaggttgccgaaggaggggtgatccggcccaggtcagaagcagagcaggttgaaatcccatgctgatcagtagtgggactgtgtctgtgaacagccactgcactctagcctggacaacatagtgagaccccatcttttaaaaagtaaaaagagccacagtggtagctctccaaggggataacaggccccacagagccctgggaaaatgcacatgtgcacagacactcagtctgccccatttcagggttttcctgcaccccctgaggactgcagtccatgccccacagcaagtgggcctcctcaagcaggacgataccggtatgggacctgtacttctgccgctgactggagggagtggcaagaagggcagggctgggaagcctaactgggaattggcatatgggtttttggtaaatccagtgtgatcagagtagtaaaaccagagctcaagtgagggttagggctggaggtcactaacaccaacccaagagggagaaggtggcgtggagatgggagaagttcccccgcagaggcgacaatgaacagagctgatgggatgtggggtggggccgggcagtttgcaggatacgcagggatggagcagcgctgagtgcccagggaggtttggtgcctcctgggaaaggtcacctgcctcagggtgaggaaggaccctcatcaccaaggctcaaggacagggtgaatggagaccgctggcaggtggcagcggccgcaggacggaagatcctgaggcagacccaggcttggccaagcttgcccaacaggtctgactgaggctccacacagagaccccatccttctcttatttggaatcccaaaagctctaagagccaagagtttatgttaaactggagtagttttcagttggaggcaagccagattgatgtgaggctgtttctagactttatttatctcacttgcgggtgtgtttatacatttcactgcagaaacattagcctgtctggttatgggagctgccccagaaggattctgaattctgcacacgtcaagctcaaagggtttggctaacagattgtgaacctgcactagagaaatttgattaaattattgtgtatctatgagacaattaaaaaaaacaaacaaaccagaaagctctccaagacatagtgatcaactaaaaaaaacccttattcatttaaccaaaacttgaaaggtatctcatgagtcagcactgttgaccgtagatgctaggactggaaaagtgaaacaagcagaaaaatactaaacaaaactctctacgtgcactgtgtacctctgtgtgtgtacatgcagagaaagaggcctggatggacacacatgaatctggtaatagtgggacctctgggcagaggggtcttgcagggatgaaggcagcctttgacacattattctctgtattttggtactttttgtattacttttgtttacagtaagcaagaattcatgtattacccctgtaattaatagagaaaaacctagaactataaaaatgaaaacacgctgggtgtggtggctcacacctgtaatcccaggactttgggaggccgaggtgggcggatcaccggaggtcgggagttcgagaccagcctgaccaacatggagaaaccttgtctctactaaaaatacaaaatgagctgggcctagtggtgcatgcctgtaatcccagctactagggaggttgaggcaggagaattgcttgaacccaggaggcggaggttgcggtgagcagaggtcacgccattgcactccagcctgggcaacaagagcgaaactccatctcaaaaaaaaaaaaaagaaaagaaaaagaaaacaaaaacaaggaaaaataactacccatttagttcaaccttattttatagatgaggaaactgaaggtcagggaggccccacagcctcaggttggagctggaaccaggctccacagactttcagggctagttcctgaaccgatgctgcctccaacatgacctgtgttttgtgaaccgtgatgatctatacacaaaattctacatgtggcctgttttgctgaagccctttttaccactgaggaatggttttatttatctgtagaagccacagacagcagggtgtggaaagtcaatgggtcaattgctgcctagtgttggagcaggatgaagaccagaacctgctgggggggactgcaactctgggtcacaggtgacctagatgagggggtccaatgtggcacaccaaggcggggcccagcagtgggatgtggacactccagtgcagccacgtaaaacttatccttggatttctagagcatgcatttgtgtgtgtgtgtgtgtgtgtgtgtgtgtgtatgcttttttcctgtttttgtacttctctcatattttctttctttttctgctgaaggggaaaaggcactgtcaccacagctgctgatcaggagttccaagttttgatttttcagtcgcagttgatttcactcattattcattatttttaacagaatgtatacatttctacgtggaaatgtttttcaacgttttaaaaccagaatgagtgaatgggaagtggcatttgagccaatgaaggaggtggtatgaacagcacggccctggctaagaggacggccgggacagaggcagggaggatcacgtccggggccaatgtcgggaccagccgcagtgagagggaggagagaaaaggcagggacttcacctgtccccagcgtcctgctgagcagggtcacaatatgagtgctttctgccaggacagccttccagggcagcgggtgtggggacagctgaggccaaggctgagcagggcaggggagtggggagggcagggcaaagacgcaccctggagatgtgtgggcccacccagccggcaggcacatctagctaggcccattccgatccgtggccagtgctaccaggcagatttcatcgtcaagtcctaattttgcaagttttcacctggaaaatcaaggggccctggcctacctgggcctagagggtctggcatggccacagtcactgaagtggagtggggttctgccactccctgcccctcactcatccactccacctgtgaggattggtgacgttgccttcaacaaataattagggggtggcttacaaaggtcccttcggacttgggaaagaagaacagttaagccagcagctggccctcctcaggatgtagggaagtgtggaagctgcaccagcccaggggaccctgccggctcccctactcccaccttccacaggggaaggccagcaagtacgatggccatggggatggcgagaaggctgagaagtgccactcagagcagaaggtgtgtccatgccagcaggaccagctgcttgggacaccagcaccaccgggagagagggtcctgcctgtcgctggtctgtgggtggtttcacctgagctgtgctgttaccatctatccatgcatttgtgttagtgaggacggaatggtatacagagcagcaggctgtcatgccatatgggaattctgtgtctccgggcccaggcctagccacacagagggtgatctggcctggagtggttttttttgagacagggtcttgctgtgtcgcctacgctggagtgcagtggcatgatcgtgactccctgcagccttgaactccccggctcaggcaatcctcccgcttcggccttctgagtagctgggaatagaggtgggtgccaccacgcccggctgatttttaaatgctgtgtagagatgggatttccctctattgccctcactgttcttgaactgctgagctcaaaccatccttccgcctcggcttcccaaagtgctgggattacaggcacgaaccatcacacccagcattgcctggaatttttggatcaaattggcctgtgccccctccggtgggaatcctaggcattctgagggcaggttagtcttgccctcgagtctccatgtgagatggtctgaccaacagagatgcctatttctgggtttcggttctcagtccgcactggaatcttcggggggaatgggtggggcattctggcacagtccctggggggctgaggtttctcagctgagaggccgacgctcagagaggctgggtgtctgctgagggtcacacaagagtggtgggggcacagagtcccagctgcagctgctgcggctgatcatcacccacattgcctggagggagtgtcagggtggtaagggtgggtcaactggtcaacctccagggcttttgtgtttgtttccgaatcaggttctttctgtgggcaccggcaggcctagtgttaatatatatggacagaaaggatgagaatcatgttggaaacgccccttcgccctcctcctcctctggaggctgggctagaaggtgggaatcacctaatgccaggctggggcaggggacagggagagacctggaggaggcgggacctgagggtaggcgacggggaagagtagggtgaaccgataccccaccatggccagagtggggggtgaggagggcagcccagcaccaaaggtgggtggagaaactgtgtcccctcccgcaaagtctcattatgttcttaagcccctccagtcccaggagttgggagatggggccttagccccagaggggtatgacatggaaaagagagccccaggcccaggactcgggggcactgaagagggagaagcacagctcagggagacggttcagaagcgccctggctctgggcccacacacccctccccaccgccttggcaggagtcagaaggctgagtgtaagccgtgactcggggaggcctggctcctcggctggcctggaagtcaagtgaaaccaggtggcaaccagggggtggggaggagctgaggacaggagggaggggggcccactccagtgcagacctggggaggtgagagactccacctgtcggggctggctgggctcctgaaaagctgacaggagccagggggtgtctgtgatcagggctgggggctgctggtgcatggttcccggacttgagatgcataggagcttgctggcagacttgtcagaacccaggctgctgcctccccctccccctcctccagctctgggtgcagcccagccatttgcatttccactttctggaactttcctaggtgctgcggctactggtctgggaactgcactttgagaaccatgtcctaggccacatgctcagctcctgttgggaccagcttcccgcagagatggcctgccttatctctaccccacctgatcagaattctacagacaagggcccagccctgacccagtctgtggtcaggaaaccaggacaagtccccttaaggggtcaagggtggctcccttggtccagcttgttccccagtcatggcccagccggccccttcccggctcccagggaagttagctctaaggtctctgccacctgcaggcctggcacccaatttgggatgctggttaccccattctccagggactcagccccagaagactgtcccgttgtttcttggggaggtgggcttggggttggagaagccccccatcagccgtgacttgtgtcccaggacttttcgtgggaacctgggccctcggcctggagctggagcatcgttctccaagtctgcatgcacaatcacagtccttcagtgttagccgggagccccctggggtgaggttttggggcatccttaaatggcctgcagggcctctgggaaaaccgtgcatgacttcaggcactcctttgtgtggtcacctccccgtggcctcacgctggacatggtaaaagcaaaccttacgacagaaatagaaaaaaaaaaaaaaggcagagacgaaaagaatctcagaaaaagatagacatgaatggctagagagttaagagaagatcaaaatggaaacctgttatccatcctgttagcaaacgaggccacgctgtgtgacacgggggcccaggactccaccaggcggcctgtgcaagcctgggctgcatctcctgccacggccaggcaggtcccacctctctgcaaagacccctcttctctagaaaggggtgatggtaaaataaggctggccatcgagaagaccgagaggcagggtcaggggcggcacttttaagatagtgacaacgagagcagcgtggagccagacgctgctgcgagctgagctgcgatcgcaaatgcacgcagctccccgcccagggcagttctcaaaacctggatccggcgacggaggcccggcctggccactgcctggcgttttctcataaaccagctttcacgaggtgttggctgctcagtcttgacatgaggtgaagcctcaggaaagcccggggctgttcatccgggtagtaaaccaggcttcggctttccaagccagacctctcctccctgcccacccctccctcggctttttggaggccacgtggacggcgctgagtgcatccctctccagcggcccaccgggcactgtgcaggggccggcgtgccttacttccctccctgctcctgcgctgattctgctcctgcctcagagatcacggtttgacatgggaaaccaaggctcagagggggcagggccgggacttggactcagatgcgtccagtttcagagccagaagcctcctgggggcctcacccactgaatcagagtgcgcgctcacagggtgcacatataacagccaccacgacccttgtaccacccggggacggcccagaacagcctggggcttggagtccccctgagggaaatggctgtgccttttcctaaagcattaaaaggtccgtaacagaaaagcgggaaatagcctgcaaggaggaagagcgcggtgagaggtcaaatgggtggcgaggctcccgctccttccctgtgcccagcctccctgcctgccccatccaagccaccacactgggctgcccagcccactccacgccgggggctctgtccctagagcctgagcaggtcctgacggggtagtcttctgtggcagcccctggtggctggactcatgttgtcacagctggggaacaagcattggggtggggttatcacccacagctataggagtgtgggacttgctgtctcctgggctctcactcctcaggaactggggctcagtcctttctgctcctggagcctctcagactcttctccttactgggccttccgctctggcagggtgggttgcggggacccctctgagctgctaatgcttccctccccccaggtctcagtgagctgtggacgcggggaattcacagagggaaacacccctgctctatcaaacaccacccccacaggcccacacgtcttcatgtcagtaggctggaagcaaatggccaaaaatggaaatgtttgtgctggtgcctgactcagtttctttgccccttatttctcttaggacgtgagtgcagccaggctccagactgttggagcccctggagcctggccggtctcctccaggagggtgctgggcaccgagccggggtggccctgctctccctgtgaccctggccgtgtgcacgttaggaagttactctcatgcccttcccccgaagcttcccacagactggtgactggctgtctgaggacgttaagcgcatcatctgccacacgtcgtggcttgatgttgactcacacctgggttcacagagcaaactgacgtaggaaacacccaatccaaagaggatgctccacagaggccagagctaagctcacccaccttcaaaggcatctgataataaaaccaggacctctgggatcagaaagttcccgtgtcggctgccaggattttcaaaagatgtattcaacctgttttagtctgggatttcatacaatatttcactgattttccctacagtcgtaatacagctgacatttctcgggaaatgaaaatccatgtgtcctaaccatctagtaccaaagcagaagaaggcagagtgcatagaatttgcagatccacagcagcattaataggcagctggagaaatgaaagcttgcattgcaggctataatacaatgcttgtatccaacccgggcttcgtgtatgtgggtatgtttttccaatattattattaaaaatacaacataggccaggcgccgtggctcacacctgtaatcctagcattttgggaggctaaggcgggtggattgtctgagctcatgagtttgagaccagcctgggcaacacggtgaaaccccgtatctactaaaatacaaaaaattagccaggcatggaagcatgcgcctgtagtcccagctgcttgggaggctgaggcaggagaatcgcttgaacccaggaagcggaggttgcagtgagctgagattgcaccgctgcactccagcttggcagagagagcgagactccgtctccaaaaaaaaaaaacgcaatacactatttcaggaaatattaggaataagactcactcacaatcccaccaacctagcacaaatatttccatttttggccatttgcttcagcctgttgagatgaggatatgagtctgtgtgtcaccagaggggggtcggggtgggtgagtgtttgataaagtgggggtctgttttcctccgtgaactcccccgcccccacagctcactgagacccggtgggagggaagcgttatcagcgcagaagggtccccgccgcctacccctgccccgtcaggagtctgagcagacaccatgggctccaggagcagaaaggactgaacctcggttcctggggagcaagagcctgggagagaacaggacgcacactcctatggccgtggggaggtgaccttcttttgccctgatgctcactggctctatgctgtgccactgatcggatgcctggtaacttcctcggccattgcccagtatcatcagacatttgagtggcttccaatattgcactattaggatgggtgcaataaatacccacaggctgacctcggctttgcctctggacttcagctccaggtttcgtctctcgctccaggcttcctgctgtccgacttcctggcactctgcacccccaccttatttctctcccacggcagcttctcatcaccccgtctggaaccaacaacaccctcttttctctttcattttacccatcctggtgctgacagctcacagcaaccctgcccgagtcttcaatggcccccacacacagcctcaccgaggaaagccacgttctgtagcctggtgatcaccccttatgcctgggcccagactccccacttctcttcctcgtctccttccacatgcccttcaaatgtccagccctggtcaaactgacccgctcacaagtctctaagacactgctgggtcaagcctcagtgcgtttgcccaggtgggtccctccacaggagcgctcctcccgaaacccacccaccggacatgttcctgctgccctcctgcagctcagagcacccctgcccatgagctctcctggcagggtcgggaactgcctgctgcatctgggtatgctctgcacactgctccaagggctgccctcacagccgactgtatttggggtttgcctgagcctcccctcctggaccaataacttctagaggctcatgaccatttaccttttatccccagtacgaatacaaagataaggtcaaagaacacactcagtaaatacacgctgagctaatgaatgaacgaacgacaatgaggcagtgggtctgagttctccctacagacagtgtgggccattttcccccgcgctgtgcttgcggagtttcccactcctctgtcccccagcttttatactcaggaaggaagagggcccaaggagaaaataaggagccaaaagcaacctgcctgcaaggcctcctcccaagatgtggcagctgtggtggcactgcaagaactgccagtgaaggacagaaatgggcaagtgggaggagattgatgcagaaagccccccgccaccatggccaccgcccaccgacactgctcctcagggcatgtccacccagcgcacgctctccacggtgtgattcttccagtaggctcacctgccagagcccttccgttattgctggatgtaaagttcccagcctcagagtctcagaagctccctgccctgaaatgcctttaacagataatttttcagagactcctgaaatgtaagtctccctccagcaagcaggtctgtcagagatgcaagacctgcttttagcgctagtcctgataatcccacagcagagccagttctccactctgctgaagaatttagggctggggtggcatggggatgagttggatttaatcttacgttccctcttctcaaaggtgaagaaaggccagatatgcctgttggaagcaggtatccctggaacctgcagcggggcagctcaggaggtggcttacacttacttaagcaagtgacttacatttacttaagcaatgctggttcttcagcggctcctcccaagtcctggaagcagcccaggggatcccagctgggagaggaaggaggctgtgggttgcagcatcagtggccgtctccttgcttgtctctcccactgcctgtcatcaacttcctcccctggtgattttgctgggcccttcccagacatccaggagcggtggagatgggccttctgactcatccagtgaccaggccaccgagtggcctccctgcctccagcccagcccagccatcctgtctcccatcactggcatccgatgctgtcactcccttgcactgaaacctgcagtggctccctattgcctatttcctcagaacacaaagccctgagtaaccagtcaaaagggagtttactgcaggacttctcagggcctttagtatgctaacatcccttgcagctctctaaggtggagattggaggggattatacgataagatttcccaaacttctgtgactgtggaaccctttccgcagggacatctcatgagtcaggtgctccagggacactgatttggggatcactaactaaaggctaaaatttacactccttaccaaggcaattgaagccttcataacccagccttgactggttccccaaacctggctgtcacgctcccgttgcctcagtgtgtggctttacataacccagccttgactgactccccaaacctggctgtcacgctcccgttgcctcagtgtgtggctttacaaaatttttgctgcctggaagcggctttccttttcctccacccagcaaagtcccaatgcccctttcaacacagcctcctggccacctcctccaggaagccctctcccattccctttccaaaggtgggtttggctacactctcccctgtgtgacagttacacagagactcacagcacacagcaacatctgcatttagtcaaagtgatgcttcagtttgcatttcacgactaagctgcacaaaagcttcagacctcacccagatggcgagacattcacacagggtctgcaggagctgatgtccactggggagctgcacattctcatccctcctcacagagggtgcccactgacactaattcaatgagttatctcttgttttgctggacttccctccacccccaagtcgtagaagtggacttgcattggttaaatgtgtatataatgtgattcccatgtgtagagttaagtgcctttcccttctgtctgtggcctcctccagaggtgttttgttcttcatttagtgacagcagagtgacaaggagctccatgtcacatggcttctccctgtggccttggtgagcccaaggtgggtatgaatatacaaagctgactgcttgcgtgacgggtgggcacatgcaggcagtgtgtggagaaacagctacgtccagccctcctgagccgttctgaagtggcaccggctgcccctgccaagacaccggtaagctcccccttgccactaatctcacatgcttacaggaaagacgctcggcggcaggagctagcagcggggtgctcagagactatgtgtcctgccaacaatgtgctcaggacggatctgtgggatccaagccacatctgctgaggctttgagaaagttctgttctccctctcaaagctaccagaggccacgaaggctggccttggattcagggtactggtttgaaccccatggacattctcaccccagtccttgctacaggaccaggatgaatatatcatttactatccaaaccaagatattttaagagagggagagaccggctaacttgcaggaagaacaggcatacactgagactgtctggatcatgtgggatgtacggtcattgtagctacaactggctggaggaggacagcagggagcaaggaggcacatggccatgaggcaggtcacctgctggtgcactccaggctcagtgtggcagaaaggtatggccacataaagaagagctgaccaagcccctctaaccagctgctctcccgagggtcccctggcacagaaccccctcatgttctcaccccaaagtgcacaggacaatgaagggcagagacagcacaatagagacccctgcaaggcctcccagtgccatctgtgggcacctgagttaccaagcacctgtcatggaggctgctgtcctgcaatcaataaggtttttaaaacttgtctgttctaacaagggtgccaagaccattccatggggaaaaacagtcttttcaacacatggtgctggcacagctagatatccacatgcaaaagaatgaaagtggacccctgcctcacaccatatgtagaaattaactccaggtggatcagacttacatgtaagacttaaaactatcaaactcttagaagaaaacataggtgtaaatcttcatgatcttggtattaggcagtagtgtgttaatatgacaccgaaagcataagcaaccaaaggagcaatagataaactggatttcaaaacaaataaacttttgtgccttaaaacaggggccccaacccctgggctgtggaccagtttgtggcctgttaggaaccgggcctcacagcaggaggtgagtggcaggacagtgagcattaccgcctgagctccaccttctgtcagatcagcagcggcatcagattctcataggagcatgaaccctattgtgaactatgcatgcaaggcatccaggctgtgcactccttatgagaatctaatgcctccaaaaccatcatccttccacccttgtctgtggaaaaattgttttccacgaaaccagtccatggcaccaaaaaggttggagaccactgctttaaaagataccgtgaagaaaaggaaaaagataagccatggaatggcagaaaatatttgcaaatcatatatccgataagggacctgtaactataatacgtaaaggattcttacaagtcaacaataaaaagacaaataggcagaggatgtcaatggacctttctccaaagaagataaacaaatagttactaagcacatgaagacataggaaacgtcattagacagcagggaaatgcaaattaaagccacgataaagtaccacttcactcccactaggatggccagaataaaagagtcagacagtcaaaaatgttggtgaggatggggggaaactggaaccctcatccatagctggtgggaatgtaaaaaatgctgcagcagctttggaagacagtctggcaggtgctcaaatggcttcacacagactgccatacgatctagtaattctgctcctatttacccaagagaaatgaaacatctgtccatacaaacacttgtacgcccatgttcacagcaacattattaaaaatggcccaaaagtccaagtatccaaatgtccaccagctgatcaatggataaataaaatgtggtatattcatacaatgaaacattatttgagactaaaaggaatgaagtactgacaccgggatgaacatgcaggaatcttgaaaacattacgctaagtgaaagaagccagacacagaaagtcacgtattatatgatcctatttatatgaaatgtctggaatagggaaatctgtagagacagaaagtagattagtggttgctgcgggctgggggctttgaggggaaatgatgggtggctagtaataggagtgtctgctattttttttttttttttttggttgatgaattgttccaaaatttattgtggtgttggttgcactactctgtgagtataataaaaaccactgacttctgcactttacatgggtaaactgtatagtgagttatatcctaagattgttataaagcaaaagcaatctgaatggctgagcccgcacggacgcagcatcacaatctgccctgggtgtcctcggagcacactcaccttatttatatctttcaaacaatgcacctactgcattcccatctttcttctaaaatgttaaagaaactgcatctacaagacacatcttcaaacagaaacacaaaaaccttacaacgaaacagggctgcacagaaggccacgccacctccagaattgccctggctaactgtcaggacagcagcaatgttttatccacacagaagcacaaagggacagaaactgtgttctctgccttcttactgagacacgaggccacaggaagtccactcaggatggcagggtccagcggacaatggtccctgctgccaccctcagcctaaattcggctcccaaatgtatcacgctaccccatggccggctcagcttttcaccacttgcaaatgtaatagtgagacccctcctaccaatagccacattgttacctgaagattgacagttcaacagaaaatgccacattagaagaggaggcctcaggaagaacaagacccaacgtggccaagcaagaaaaggagaaaggagacctaagagtgtgccagcgctgaagagaaacaccttggaggtgtctgacagcagtaccactgttagtgcaactcctcaccagtacagaacgccctccctcactgggtgctcaaaaccacctgctcagccatctgcattttgcagagagactcaggcaggacaagagcccaaggacccacagcgggtgcctggcagaaaagcagctcaagctcaggccttcgaactcccaaccgtgcattgttgccgaagtaaacgatttgttgcatgcatataaaacatctggctcgagagatggccctggcagggagcattagccttaaatggaatagttttcagccttaaaaaggaaggaaattctgacacatgcgacagcacggatggaccttgaggatgttacgctaaatgaaagaagccacaaagaagaagtcacggaaggacaaatgctggatgagccaagccagggtactccaagtcataaagatgggaagtaaatggtgggtgccagggctgtggggaggaggaatggggagttatggcttaatgggtgcagagttttcgttctgcaagatgtaaacagttctgatgatggttgcacaacaacgtgaatatacttaatgccactgaactgtacacttaaaaatggttaagatggtacattttatgttatgtatgttttactacaataaaaaaatttccctggcaccattcagatcatgtgagaccagctcccaatgcatgtggaaggaaattgataaaaatcatcaatcaagactctcttccctcttttccttttttttttttttccagacagggtcttgctgtgtcacccaggcgcaatctctgctcactgcaacctccacctcccgggctcaagcgatttttctgcctcagcctcccaagtaactgggactacaggtgtgcaccaccacgcctggctaatttttgtacagatggggtttcaccatgttgtccaggctggtttcaaactcctaacctcaagtaatccacctgctttggcctcccaaagtgctgggattataggtgtgagctaccaagcctggcttcttccctcttttcaactgattttccaagggtgccaaggagtggggaggacccaccccaaccctgcccaccaggtgccctgacagaaggatgggacataaccccttggtcccaaggaagcaggtgctcagtgtggccacagactatcaaacctggagcgaaagacctgggagggcaggaggaagggaagcttcagggaggaagcagaggcaggacaggcaaggaggaggcccagggctccagcacaggcagagcatacagtcactatctgcacctgtcctgccctgcaggcctggagcctcctgagggcaggtccggtacaggtttaacccatgccctgatgctcagtcagcccagaggctggcacagaacagtgcctgccacacactgggtgagtcaaccctgagccctcaactcggagccactcccagctggagaacacctgctaggctgcatagggcctgcagccccaccccaggaatgcagaggcagccccaccagccctctctcagctcactccctgaagatctccaaggaagacaactgtattgacagcacggggtacttttcctgctccaagaaattaactcatttcaaaagccacgatgttccggcctcaacatggtgttcacagctaaactgtgtggcctgaaggttcacatctttgggtaaactgaaaatcatccttagctagcatttggctgcaagttcagcctcctggttcctgagtccaccctgacacgcagaggggactgctgatggtctgactcccatctgctacacatggggaaactgaggcccagagagatggtatgcctccccagggtcacaagtgggacatagcagggctagaattacaaggccctgggtctcgggcaagggctgaggggaattagttgagctaattagtcatgctaagcagcattcggctctcagctccaaacgtccaggcttggttccggccccggctgtcctccgagagtctctccccggcgggcaggcgctctgggcattcggctctcagctccaaacgtccaggcttggttccggccccggccgtcctccgagagtctctccccggcgggcaggcgctctgggcattcggctctcagctccaaacgtccaggcttggttccggccccggccgtcctccgagagtctctccccggcgggcaggcgctctgggcattcggctctcagctccaaacgtccaggcttggttccggccccggccgtcctccgagagtctctccccggcgggcaggcgctctgggcattcggctctcagctccaaacgtccaggcttggttccggccccggccgtcctccgagagtctctccccggcgggcaggcgctctgggcattcggctctcagctccaaacgtccaggcttggttccggccccggctgtcctccgagagtctctccccggcgggcaggcgctctgggcattcggctctcagctccaaacgtccaggcttggttccggccccggctgtcctccgagagtctctccccggcgggcaggcgctctgggcattcggctctcagctccaaacgtccaggcttggttccggccccggctgtcctccgagagtctctccccggcgggcaggcgctctgggcattcggctctcagctccaaacgtccaggcttggttccggccccggctgtcctccgagagtctctccccggcgggcaggcgctctgggcattcggctctcagctccaaacgtccaggcttggttccggccccggctgtcctccgagagtctctccccggcgggcaggcgctctgggcattcggctctcagctccaaacgtccaggcttggttccggccccggctgtcctccgagagtctctccccggcgggcaggcgctctgggcattcggctctcagctccaaacgtccaggcttggttccggccccggctgtcctccgagagtctctccccggcgggcaggcgctctgggcattcggctctcagctccaaacgtccaggcttggttccggccccggctgtcctccgagagtctctccctggcgggcaggcgctctgggcattcggctctcagctccaaacgtccaggcttggttccggccccggctgtcctccgagagtctctccccggcgggcaggcgctctgggcattcggctctcagctccaaacgtccaggcttggttccggccccggctgtcctccgagagtctctccccggcgggcaggcgctctgggcattcggctctcagctccaaacgtccaggcttggttccggccccggctgtcctccgagagtctctccccggcgggcaggcgctctgggcattcggctctcagctccaaacgtccaggcttggttccggccccggctgtcctccgagagtctctccccggcgggcaggcgctctgggcattcggctctcagctccaaacgtccaggcttggttccggccccggccgtcctccgagagtctctccccggcgggcaggcgctctgggcattcggctctcagctccaaacgtccaggcttggttccggccccggccgtcctccgagagtctctccccggcgggcaggcgctctgggcattcggctctcagctccaaacgtccaggcttggttccggccccggccgtcctccgagagtctctccccggcgggcaggcgctctgggcattcggctctcagctccaaacgtccaggcttggttccggccccggccgtcctccgagagtctctccccggcgggcaggcgctctgggcattcggctctcagctccaaacgtccaggcttggttccggccccggctgtcctccgagagtctctccccggcgggcaggcgctctgggcattcggctctcagctccaaacgtccaggcttggttccggccccggctgtcctccgagagtctctccccggcgggcaggcgctctgggctcctgcccaggactgtttggcgtggacttcaaagagcagaacagctgagcatctggggcttccctggtgtccagtgaacaaacgtcaaagatctggcactgaggggccacctgtccccatgtgtagcagatgggagtcagaccatcagcagtcccctctgcgtgtcaggaaggactcgcagaggctttctgggactcggcttgctccaagcctggctgtgcacccagcctccaggaagggctgtgctgggcctcagtggcagcatggctgggctggcaggacctactcagtaccaccttggagtcaggctggcctggtcattaattcactccttcctgccgccaccaacatccactcagcacttcggatacaccgggggcagagctgagggggagacaaagcaaaagaaaacggcagggatgctgcgttagcaagacgcaaggagggggcgctccggcaggcctctcgcaggagtgaggcggggcaaggatttaaggacccacagctgcaacggatcagacatatgtttcgggggagaaaacttaaaagtacagcgaggattcagtaactgaggcttaacgaagaagccaaagtcatcaggacacagaactcacaactatactgccccttctaacatcagtgcccccagacacacctgcctgttcacgggcatccgcccccactcatgccgctgtcttggttagacagcgcctggataaccgttacatgccataaatgcacctgctgtttgaggaggttatctgtgcctgtaataatgtgatgcgaatccactgcaagtgaagccacagatgttgtaaaaagttgcagaatttcggctgggtgcagtggctcatgcctgtaatcccagcactttgggaggctgaggagagcagatcacgaggtcaagagattgagaccatcctggccaacatggtgaaaccccgtctctactaaaaatacaaaacttagctgggtgtggtgacacgtgcctgtagttccagctactcaggaggctgaggcaggagaacagcctgaaccttggaggcagaggctgcagtgagcagagatcacaccactgcactccagcctggtgacagagtgagacttcatgtcaaaaaaaaaaaagttgcagaatttcatgaagttgatgtgagtgatgctgtaacactgcctgggtctgatgccgagacatcaacaaatggggctgggtcttggcagagtgaacccagttaaccaaagaggataataagggcatgttggccatgtcaaaagagagcaacttgggtaaaaaagatcaggaaagccatataggaaaagtgacagagcctttgaatatttgtgcacgaataactccctttatcaacatgctgtggcgttcagatgtgaacagtcttcatgtgctttcacacgtttatttgtaaaataactccaaagagaaaaaattattcttttttttatttaaaaaaattctcagctgggcatggtggctcacgcctgtaatcccagcactttgagaggccgacgcaggcggatcacattgggtcaggagttcaagaccagcctgggcaacatggcaaaaacccatctctactaaaaatacaaaaattagctgggcgtggtggcacgtgcctatagtcccagctacttgggaggctaaggtgggaggattgcttgaacctgggaggtggaggctgcagtgagctgagattgagccactgcactccagcctgggagacggaatgagactctgttcccccaccaaaaatacttctcccagagttatagcttaaatattgttaaatgtaaaattaattcatttttacaattttcggtttctattttcaagatttagtcccaaggaaacctttgttcactatttattatgaaattaaaaggcctctttcagggacccgttgttctcataggaaagggatcccctaggcacgtcttgtgctaacaacatgtctctcgttaggctgtgagtgctcagggcaggtcttagcgttttcttctttgcatcccagcacccagacagcctggcactgacgagctgccccaccaggcgctggtaaacacacgggtggagagactgcattctgcgtcactccgggatgactgctcagctccagcgtacagcagtgcccttgcagggtccctgtgcacgggcagagggccctgggcttgtgggcttcagttgctggggctggaaggggcacctggtccaaggtcatgcacacggatgctggcatcgaaatacatcctgatcagatggctcctcacaaaggaaaatcactgacatggagtgtggtgtttctgagcaggaggtcagcagccccaggacctgccttctgctgcccctccctccctcacgtgctggggagctgcagctgtgagcagccagcacagagaagagagagagtcaggagtcaaagggagggcccctgggagggagagggaggaaaagtaaagatagacagagacggaggatcctgccagcactcactagctgctggatccagccatggctgaagctagcccagtccaacacttttacattttgggagccagcaccttctcctttttgttgaagccagtctctcttgtttgtgactgggccaccttgttgagccgattgctgggaacatggaagggagcagctgacggcaggctgtcaacacaaggcccacgcccctgcacgggggaaagcacaggagactcaccaaaagctctgcaaacatgggctgtttacccagttttaaaacaatcctactcaagggttgtggggagggtagcaaaacaaacaagcaagccaaaaccaaagatggtttttaaaaacagagcatcaaaaggaggctgaccaaaggagggaggggagtaaacatctctaactaaaacctcactcgaggagatactgaagtatccagagcggccaggcttcagacttggtctccagggaaaaatgtactgacatgattgttctctcagttagaataacgacggccgcatggttctcattcccttcggctcatctgtctccggatccacccgcgtccatgcctaggggcctggggacagggttcctggcactgtgctggggcacagtggagttgatcgatatttgttggttaaatgaatgaaccagcaagaacagtcggagcccaattggaacacctctatcttttaaatttttatttttaaatctacatggaataggctgggcgctgtggctcacacctgtaatcccagcactttgggaggctgaggcgggtggatcatgaggtcaggagatcgagaccatcctggctaacacggtgaaaccctgtccctactaaaaatacaaaaaaattagccgggcgtggtggcgggcgcctgtagccacagctactggggaggctgaggcaggagaatggcgtgaacctgggaggcggagcttgcagtgagccgagatcgcgccactgcactccagcctgggcgacagagcgagactccgtctcaaaaaaaaaaaaaaaaaaaaaagtctacatggaataaaatgcattctttttggtgcaccgttctttgtgttttgacaatcgagacacagaacagctccgtcagccccaaactccctcgtcctctgtaggaggatctgttctctgtttctatagttttctaaaaattgtggtaagatagacataacataaaagttaccattttaaccatttttaagtgtacaattcaatgacattaagtacattcacaacggtgtgcaaccatcaccaccatccatctccagaactttttttttttttgagatggagtcttgctctatcgcccaggctggagcacaatctcagctcactccaacctctacctcatgtgttcaagtgattctcctgcctcagccttccaagtacctgggattacaggcacctgccactacgcccggctaatttttgtatttttagtagagacagggtttcaccatattagccaggttggtctcgaactcctgacatcaggtgatccactggcctcggcctcccaaagtgctgggattacaggcatgagccaccgtgcccggctatctccagaacttttaaatcatcccaaacaaaaactctgtacccatgaaacactaactctccatttcccatttcccccagtgcctggtaacctccactctactttctgtctctatgaatttgtttattctaggtacctcacatcagtgaaatcaatcaatatcatccaactccttttgggtctggcatatttcacttagcataatgtcctcaagattcgtccactttgtaacatgtgtcagcattcccttccttttaaggctgagcaaatactccatcgtatggatggatcacagttggtttatccattcatccattgatggacattgggtcatttgtatcctctggctattgtgaatagtgcggctatgaacactggggtacgagcatctgtttgagtccctgctttcagggatcatccctgtagttctgcctcataagaatgtcatagaaatgaagcataaagcatgtagtatgatttctatttttgagtctggcttccttatcttggcatagcgcatttgagatccacccatgtggtgtgtgtcaatagtctgttcctgtttattgctgcatagtattccactgcacaaatgtaccacagtttctttacccattctccatttgagggatatttgggttatttccaatttgggtaattatgaataatgccgctataaacatttgcatacaggtttttgtgtgaacatagctttcttttaggtaaattgcagagtcatagaagtagatgtttaacttgataagatacactacccaactgtcttccaaagtgcctatgccatttgacatccccctagcagtatatgagagctctggttgctctgcaatctcaccaacacttggtattgctaattgcctttgtctttttttcttttgagatggagtctcgctcttgttgcccaggctggagtgcaatggcgcaatctcggctcactgcaacctccacctcccaggttcaagtgattctcctgcctcagcctcccaagtagctgggattacaggcgcctgccaccacgctcggctaatttttgtatttttagtagagatggggtttcatgatgttggccaggctggtctcaaactcctgacctcaggtgatccgcccacctcagcctaccaaagtgctggaattacaggtgtgagccaccgcgcccagctgcctttgtcttttaacccataaagtatccattagttgtcagatctaaataatagaataatgatagcaataagaagtgagtgaatgagtgaactggctgggcgtggtggctcacatctatagtcctagctcctagggaggctgaggtgggagaattgcttgaggccgggagttggaggccagcctggacaatgtggtgagaccctgtctctaaaaacagagacacagaaaaacatatttggagccaaaaaaagtagctctcacgaagacagagagtagactggtggctcccagagtctaggaagcaggaatgggatgaggagaggttgattaatgggcacaaagagacagttagaataaataagatctagtatttaatagatcagtagagtgactatagttaacaataaccaattgcacatttcaaaatagctagaaaagaattatttaaatgtttctagcaaaaagaaaagataacatttaaggcaactggctgtgtgtggtggcgcatgcctgtagtcgcagctacttgggaggctgaggcaggaggatcacttgaacccaggagttcaaatacggcctgggacatagcaaaatcctgtctcttaaaaaaagaaagaaaaaacatatatatttaaggtgatggataaaccctgatttgctctttacacattatatgaacgtatcaaaatatcacgtttcctccaaatatgtacatctgttatgtatcaatttgaaaaattcagaaatagaattaaaaatccaaaaaaggagaaatgttccatgaattctgagcacacacaaaaacgtgagtgaatgaatgaaaatactatttactcaaaaaattagccaggcgtggcagtgtgcacccacagtcccagctactcaggaggctgaggcaggagaatttgcttgaacccaggaggtggaggttgaagtgagctgaggtcgtgccacggcactccagcctgggcaacagagagagactccatctcaaaaaaaaaaaaaataaataaataaaaaataaataccatttaccgaaatcttctacaagtcagacacatatcaaactgttactgcacgccagatgtggtatatacagtttacagtgttttatctcatttaatccttacattagccccaatttactgaggacaagacttagacacagtggaggaataacctgcccaaggtcatgcacccagcaacggctgagccagacctgacccaggagttctggatccaacacacctcatgcctccctcaatatggcgctaaaatgctacttgcccttccttcccttggagagtttcaaacgcgttatctccattattgcaacagccccttgaaggtgggattgttcttcctatttcatcgatggtgtccactcagccagtgagacgcagaggccccggtgcctggcccacctgtcctgagccccagcctccaccatatgccagggctcacaatgtgtaacgccacttccaggcaaaaggcctaagaatgaaataaaggccaagatcttcaggtacctttcagagccccaagtggtccttatagttcctggctgagatgcctcacaaatgtgtaaccattgtttgaagccgcttccctgtgcaccaactgtgcccaacacctgcaacgctttccaagaaagacaatgtgaggccaaaggaaagaaaagaacaaatgcttttacgcaaacaccttgattgaagtgttgatctgaaggcgcttgtgagccttttggggtggcccagaagggcagacctgtgaggcccccatcatggcctcgaagccacaggcttgtccagcttctcgtaacaaaagcctcaaaagaatgacggatttttctaaagagaagttcaaaggatcttttctggcctttggtgagattcccgggaacagagaggcaaggaagacaggcagatggggtctcctgcaccccatgtctccccatggccctgcacacaccctgcctccattcatgtagtgaacagtcagaaccggaagacggcagccattcgcggagcgcctactgtgtgcaggcagcatctgcctccagttccggcgttctctcttcagatccccttgtggggtaccatgcccatcacaaggagtggccacaccttagtaatgtgctcaatcgcaatcactgccaccatcattcattcatttaacaatgaaggaccacagtccaatagaagacacaggtgtggatgcagcaaggagaggcaggcaccaggttttcagcaacaccaggagggagaaaccagtgctgctgggcagggcacacttcatgcaggaggagattcttgagctgtgtcctttgaggagtttgccaggaagaaaagggcactccaggcagaaagaacaacacagacaaaggcaccaaggcatgaaattgaaataacatgaaaatttgagggaaatacagctgattccttatggtgaacctggcccagcccctccattggtccctgggaccttgatccctgccgcacatagtggccactcaataaatctatgctgctggccagagaccaatggtcctgcaaggggcacgaagaccatgtgtgataaccagacccctcatgtcctccgtcccctcagagatgcagaggctcacgtgatattgaggatggaggccttgagggttgacagagacctgggcccacacctcttggcattccctggggtgtgcgagctgcaactctccctttccctgtctcactccctctcccagtcaggaagacaaacctaggaccagcacaccaggacaagaatgagctcactatgcagctaaccttgattttgctttaacttataatagaaaaggaagtcatctacaaaccctggtgtttttgctattgtggataacacataaccaatgacatccccataccaggtgcccctgccgccatgatccctcctcaggcttggccaggtgaccccctaagcatcccttggagcccatctctacctcccgcattcgcaccacaggccacaaacactggcagcccaagggccagatgggcttgcatgcccgcagcgtgtctggttctgtgtttgctctgggaagtgatggataaaccacagcccggctctgaggccacctccaccctgacgtttctgccttggttttgtgagtcagtaagttctcttttgcttcagctagtttaagttgttacatgtttcaacacttctgattaatatagctctgtcctcgtttacattgttcttcaaacaaactatgattcaatttttgtattttctttctgacccaatagttttaggagattgtaaatctccagatggcaaggtttttgtatgcttaaacactttcattattaatgcctcatttattacactgtgataagagggagaattgaaagaggtgactcctttcctttgcattgttaaaaaaagtatcacatacccaaatgtgacatgcaatcgcacctactgttgaaactctgaaagcatccccattaaagtcaggaacaacatgaggatgcacgacgaccaccactactgaacagttctccagaaggccaagagaaaggaaagaaagaggatgaaaaatacaattacttacacattgtatgatttgatactgcaaatccatgagaacaaactaaaaaccactaggagtaatggaagaatatagtaaagagaatagatgaatatttaatattcaaaaactaggctgggcgcagtggctcatgcctgtaatcccagcactttgggaggtcaaggcgggtggatcacttgaggtcaggagttagagatcagcctggacaacacagtgaaacctcatctctactgaaaatacaacaattagccaggcatggtggcatgcaactgtagtcccagctacttgggaggctgaggcaggagaatcccttgaacctgggaggcggaggctgcagtgagctgagattgcgccactgcactccagcctgggcaacagagtgagactctgtctcaaaataaacaaaccaacaaacaaaaactaatggcattctcatgtacaaataataaccagttagaaggtatagtggagaagtgtcccatttttaataactaaaagaacaagataaaaaaaaacctaagagtaaattcaataagaaatcaaaagatgtatatgaaggaagcttaaaataactctcctgagggatactgagaaggcaaacacagtggaagacatgctagttcttggagaagtagagacatgttcagcattgaaaagatgctcatgttccttatattaatctccaaaattgatgacataccaataaccatacctacactcttttttttttttttttcttgagacggagtctcgctctgtcatccaggctggagtgaaatggcgacatctcggctcactgcaatctccgcctcctggattcaagcgattctcttgcctcagcctcccgagtagctgggattacaggcacgcgccaccatgcctgactaatttttgtatttttagtagagacaggatttcaccatgttggtcaggctagtcttgaactcctgaccttgtgatctgcccgcctcagcctcccaaagtgctgggattacaggcatgagtcaccgcgcctggctacctacactctttatttgaaaacttaaaataatattgggattcacgtggagaaaacacatatgatagctttgataactttgaaaaattagtgtaatgagtaaagactagccagattaagaatttaaaatgttataaagctacaataattaaaacaacttggcaaaaagatacagtagacatactttccctactcctcttgctaagtacagctaaaacccctagacattatatatacatatgaagaagaccctgaaagatggagagaaacagatcagctaggcaacctggggcctgagaaaggacagagaggtgaatttacttgtttgtttcggtctcatatatgcagaactgggtgctaaataagttggtaactcagaaacacccacagtgtcagtggaagccccatggggagcagtaatgaggcactcctgccccacccagcaagggtggcatcagtggaggcctagtggggaggtggaactctcatcccttcccaatagtaacaaggagcccctcaccaccttaagtgtcaatggaagctcagttgaaaagttggactttcaccctccacctgaaagtaatgaagtggtgctccctccccctttatcatcagcatggtgtcggagggggccagctgaagcacaagatttaacaaaatccagagtctcatagcacaatacacaaaatgtccagggtttaataaaagatcatgcatcataccaagaaccaggcaaacctcaactccaatgggaaaagacaatcaacagatatgaacactgatgtgacagaaatgttggactatctggcacagactcgaaaacagccattataaaaatgcttcagtgagcaattatgaacacacctgaaacaaatgaaaaaacagaaagtctcagcaaagaaacaagatatgaagaggaaccaactggaaatgttagaagtgaaaaacacaagaaatgacatgaaaatttcaatggagggctcaacaggagaatgaagaggacagtggaatcagtgagcttgaaggcagaaccaatagaaattatccaaactgaacaaacagagagaaaatagactagggaaaaaaaaggaacagagccgcagggacctgtgggactaaaacaaaagatctgacattagtgtcagcaagagtcccaagaggagaggagaaatggagtgagactaaaaaagtattcaaataaataatggctggggaatttccagatgtgcccaaagacctgggcctaccaatttaagatgctgagcaaacatccaacaggaaagaaaccgaagatttctacaccaagaaatatcacagtcaacttctgaaaactcaaggcaaataaaaatatttcagagagaaatgacacctcacttactggagaaaagcaattaaagtgacagtggatttcttctcagaaaccacggaggccagaaggaagtggcaaacattttttcaagtgctcaaagaaaacacaaaattctacatctagtgaaaatatccttcaggaataaaggggaaattaagacattttcaggtgaggttaaattaagacaagttgtcaccagcagacctaccctaaaagaatgcctaaagcaaattcaaaactggaaggaaataattaaagaaggaatattggaacatcagggagggagaaagaacacagtaagcaaaaatatgggtaaatataataggtcttcttttacagagttttctaaattacatttgatggttgaagcaaaaattagaacaccgtctagtgtggttctcaatatatgtacagaaaacatttaagataattatgtaacaaatgggggagtgtaaaggaatgtaatgggaggaaaggtttctacacttcaattaaactggtatagtcaccctgaaaaatagtttgggagtttcttaaaaaaaccccaaaaaacaaaaaactaaatatacacttatcaggccaggcgcggtggctcacgactgtaatcccagcactttgggaggcggaggcaggcagatcacctgaggtaaggagttcgagaccagcttgaccaacatggagaaaccccgtctctattaaaaatacaaaaattagctgggtgtggtggcaggagcctgtaatcccagatacttgggaggttgaggcaggagaatcacttgaacttgggagtcagaggttgcagtgagccaagaccgtgccactgcactccagcctgggcgacaagagcgaaactctgtctcaaaaaaaaaaaaaaaaaaatacacacacacacacacacacacacacacacacacacacacacacacatcatgtggctgaacaattgcactcctaggtatttatctcagagataggaaatttttatgtccacacaaaaacctgtacatggatgctcataatatttgtatttgggttatgtgtagtagccccaaattggaaacaaccaaaatatccaacaataagtaggtgactaagccaactgtggtataaccgcaccataaaatactactcagcaataaaaatgaatgaactattgatacatccaacttgggtggatctcaagggcatcatgctgagtgagaaaagccagtcttcgaatgccacacatggtataattccagttctaaaacattcttaaaatgacaaatgtaaagctttcttaaaatgacagattggtgattgccagaggttaagagtggtgagaggttggagatgttaggaacattgtcatggtatgatagtgctgtatagtgactgtggtggtatttacactagtgtgtgtgtgtgtgataaaatggcacactgcaacaatgtcaatttcctggttttgatagtgtaccagagttacatcagatgcaactattgaggaacactggctgaagagtacaagggacttctctgtactatttttgaaacattctgtgaatccatagttatttgaaaatgaaaggtaaaattttaaaaagccatttggcagtgaagaataaattgacaatataatcacaaagtatgtagaactcagaaatggatccaaatacagttgagaaattagaatggcataaagatggcatttcgatcagtgctaaaggatagattgttcagaacagataaaattggatgcctacctcagtcattttaccaaaatacattccaaatttatcaatgatataaatgtaaatataaaataaataaaattgtaagaatgagaccttcatgaatttatttacattagattgaggagcgctttctaggaggatataaaaatctggatttcatgaaagaaaatactgacacatttgactatttaaaaacaaaaaacaaaaaccatcataaacagggtcatgcaactaacatcaaattgagacaaacagttttaccatctatgatgaaaggttagtttctacattagaaatgcttacataatacagtatgaaaacagaagttattagaatataggacgaaggatatgaataggcaatttacatagagcaaaatgagaataaatttgtgaaaaatatccaacctcacattttgtgtttatgaataggaatacttaatattgttaagatggcatcacttcccaaagcaatctacagattcaatgcacttcctatcaaaactccagccaccttttctgcaaaaatggagaagccaatcctcaaattcatacggaatagcaagagggcttgaatagccaaaataatcttgaaaaagaagaacaaagttggaagactcacacttaaccaatttttaaacttactacaaagctatggtaatcaaaacagtggggcattggcataaggatagatatagaccaatggataaattgagaattgagagtcaaactcaatatctacatgccaaagaatcaaactgaacctctacctcacaccaaatacaaaaattaatgcgaaacagtggcttaaatataacatctgtaactacaaaattcttagaagaaaacacagataaatcttcatgacaatggacttagaagtggattcttagatatgacacccaaaatacatgcaacgaaagaaaaaccttcatcaaaatgcagtacaatttcatcaaaacttttgtgtgttaaaggacattatcaaaaaagtaatactacaccatacagaatgcaagaatacattttcaaatcatatatctgacaatactaatagtaattcagaacatatctagaatatataatcaaattaaaaaacgcttacaactcaacaataaaaatacaaacaaccctattcaaaaataagcaaaggacttgaatcgacattttgctgaagaagatacacaaacagccaacaaggatatgaaaagatgctcaacactattaatcatgcaacacacaaatctaaaccacagtggaataccacttcacacccactaggaaggttaaaccaacaacaataacaacccagaaaataacaagtgttgatgaggatgtggaaaaattggaacctttgtacactgctggtaggaatgtaaaattgttcggctcctgtgaaaatgtttggtggttcctcaaaatcttaaacagataattaccatatgacccagcaaattcactccctgttatataccccaaagaagtgaaaacaggaactcaaatacatacatgtacgtttacaacaacactaatcacaatagccaaaggtgaaaacaacccaaatgcccatcaaaagatgaataggtaaacaaactgtgatacacacatggaatgaaattattatttatccataaaaggaaatgaagtactgatacatattacaatgtggatgaactgaaaaaaatatgctaaataaagtaatccagacaaaaggtgttgtataacttacatgaaatatacagaatatataaagccatagagacagaaagcagactggtggttcccaggagctgggaggagggggaaatgggggatgaatgactgctcaatgggtataggttcttttgcggtgatgaaagtgttctgcagctggataaaggtggtggttgcacaacgctgtgaatttattaaatgctactgagttgttcacttaattttgtgctatatgaatttcacctcaatattcaacctcatacataattaaagtcattaaaatccaagcaagatactatttttgcctatagcattggtagaacatttaaagtttaacaatactctgtgctgatgaagatgtgtggaaatagaaacttgtgtgtaatgttactgagagaataagtcggcatcattttaagggcaatgtggcaaaactatcagcaatttaagggaaagttttcatctttgactaggcaagtccattgacagagtttttccttataaacacactcatgaatgtacgtgtaactgtaacattgtatataatggtaaaaatggaagcagcgtaagtatcgatcaattgaggagtggttgaaataaatcatggtacattcacacaatggaatactattctaaaaagaatgagaaagatctgcatgtgacaatgtgatctctatgatatattattctttgaaaatataaggtatgagtagtgtgacctcatttgtgtgagtttgtggagcatggatacattttttttctgtaaggatatataataatctgttaattgtggctactttcctcaaaaagaactagaggtaaaggaagggaaagaaaacccagttttcattttacatttttccatcctggctaattttcttcttaccactaaatataaacaaatttacagttctccaattcccaaagtcaagaagaaaataacttctaaagtctgttctacacacaatgattttggaattctgtatatctttctttacttctctaccccttccttaattttccagtctttattaatgtaatctgggattacagagatcatatttttgcacagttctttattttttggtgaagcataatatacataaaagtgcacgtatcacaagtgatatgacatttttaacattttactctttttttgaaaaataatttttggatttgattttgtgactataattttaaattttcagtgtctcaatatatttcattgattttggtgctcacatagactttcctctctggattctgattttgattccttttttccttgactgattacatatgctaagcagttttctcagaaatgctaagtaatatagagcctgagacactgtacatcatctggaaatgttgtttccagtcttcacccaagaatgacagcacagccatatatggaattgttgagtacaactttttctattccaattctgagcctgggcaacatagcaagacccatttctacaaaaaaaaaaatagctgggcatactggtgtctgcctgtagtctcagctacttgggaggctgaggcaggaggatcactttagcccaaaagttcaaagttacagagagctatgactgtcatagcattccagcctggacacagagcaagacccatctcaacaacaaaacaaaacaaattctgtaggcacagttccactgtcttctgatgcttagaaccatggagaaatttgaggctattttgcttttggataatttgcagatattggtcacatgactgtttatggtagattttttcccccttgaatgcttgtagaatagatttttaccctttaaattaaaataacttgctacatgaaatccaggtggcgttttccaatttaccttgaattcaacgagtcctttgatagaaagacagaactttctcagtaaacttttcttatatcatatgttcaattatcctcaagattctttcccatttattctacttcagtgcttggaattgtgccaggcactgagaatgcaggagttcataagacatggtttctgatctcaccaaactttagttcaatgggaaagacagacagctgatcaagtaattacaatgaagagtgatgacagttacaagagagaagttccagatgagatggatcacaggctgcatgattgctcttagcttggggtaactgggaaggtctcattagcctatgtggggatggggaattggacaaggttagcagagggttccaggcaaaggaaacagcatttattaagaagttgggaatgcctgaatcttaggggaagtgcggtattgttgtaaaagctaagtattattatttggggaggtgggtgggtgtcagtttcctcttttgtctatccaatgtctgtttccatctgcagataaggtcttgggagctccttagatctgagcccaatctgcttgcatttttgacagcttctctgtgccccaagcatgaagtccaagctgatgtaaccagcctgcagctggggctaggacagcaagagggcacataattcatgctgctgtgtgctccggtcctgcagtgggaagactcccagctttacagagggagctgagaagggggaccctggccctctgctgtcacgctctcctctgttgatctcatgtggggaaacaactccgccctgtgctgggccagcatcagcaacagcatcaggtgactttgttattcccacagcaacagcagtgctgtaaatgagtatctaccacctgctggcagatgatttatctacttgattgcaagctctcagagggcaggaattgtatgtaccttatgtcaccaccaccacctggcagagggtctgggagagtgccgtggctctggcattaactacaaatatcctttttttaaaaaaaaaaaaaggacttgttttccctcccatttaccacttctccaaaggcaggtaaatgtgtaaaaaaaggcaaccagggccggtgtggtggctcacgcctgtgatcccagcactgtgggaggccgaggtgggcagatcaactgaggtcaggagttcgagaccagcctggccaacagggtgaaaccccgtctctactaaaaatacaaaaattagctgggcatggtagtgtgtgcctgtaatcccagcctcttgggaggctgagtcaggagaatcacttgaacccgggaggcggaggttgcagtgagctgagatgacactactacactccagcatgagtgacagagtgagactccaactaaataaaaaaaggcaaccaggaaagcaagtagtccctgggactgcttctcagaaacccaacccagctaaggcagccacatcccacagccctgcttgaaggcaaagcaagaccatcgagcccacctaggtaggtgatgacgtgtggaggtgtgggtaggggtggggagtgggaggaggtaacaagggggtatgaagtggagtggggtgaaaggagagccagaaatggcacccaaaatgcagctgctgctgacctgcctctctgcttccacaataagatgagggcaggtttttaaacagtttgtgcctcagtttctcagcacgaaacccggaatatgtgagtgctggttctctctgccccagtgagctgggctgcttggattcagcctctgactctcccaggaaggagctccagtcaaggatcctggcatcttgcttggtgcaatgacacactcttttctccagtggggtccacatggtgccagttacagtgctcagtggggacgagcccgccttgctgggtgagtgacgtgggtctgtgccacagtgggagtgctgcagacactgagccaccaggctgagtaaacactgtgctccaaatcagtcgaacgtctaaaaaccgtcctgccccccaccctcagtgcacaggctgtggcctctttctccccgggcccgggccctggagcacggctcaccctgctgcctctctgcacaggcttgctgctgccagccggcctccacgaacacttctactgtctcctgacctctccacagccagaggacacgagggacgccccttgcagatacttccaatgtgctgactgctggcaccagaggacagtgctgcccccatcccgccctggctccatgagggcaaggggactgtgcgggcggcggtgaggtgggcagtcagcagactgtcccacgccacatctgtgcccgagccctgctgcacaaggggatgcagaagagtgagcacgaggttcttgcccacagagagctcccagcctagcgggaggtagacaggcaaacaagaaagactgaaaactcctcgagggcacaactgcagacatcaggggcaggataagggagaggaggtactgggtgaggccagggagggcttccgagggaggtgattccagggctggatgggaccagagagagctttcaggaggtgaagtcagagctgggccctgaaggatgggaccagggagggcggacgaagctggggcagagccagagatccagaaacagtaggccaagtcatgagagtcccaaacatcagctgccccagtgccattctcactgagtctaaaccctcccattcattcattcattcattcattcgctcgttgactacatactggtgacctactgttgccagggacccaatatagacaagagatgagcatccaggttgttgtacatctggattgcttacataatgtgtaaaacatgatgaccaactagttgccagggacccaatatagacaagagatgagcatccgggttgttgagaggttcagtcttagagatgcgcaaagagacagccctgcagctggcctgcctccctcaggaggctccccgggcctccatcgtggctgaccggagctcggcacctgtcttctccttggtgcctggatcagcttggccttggggaaaaccccgagggaggcagtgctgctggtctggctgctgggagtgagcccggaggggtggggcccaggaggagatgtagttggaccaggatgatacggaggggttagagggagatgggtggcttccacaggtattcagcagacaggattaaccatacccatgcctattttaaaatcatttgtatgtgctgagtgctttgtgaacattatctcacttaatcgtttcaagccggtagtagtatccttcccatttcacagatgaggaaactgaggttcagagattaaataacttgtccaaggtcacacagttaagtaggtaactgatgagatctggagtgggagttgctaaggatgaccccggaatctagtttaagcacacagcccccagggcaggggctgcattctcagatggagagcatagcagggaggagctgagggtgagggcaggctgtcaacacacaggatgatggcaaagcctccggttcaggcccatcacaacctgaccacagcccgagatctggcctcctctcctctctcagccctccccaggtataattctttcccaggagacctggagcttcctgagacttaggggccttgtgcagttcagcatgagcataggacctgccaccaaatagtgcttgttgaatgaatcacgatctgattcactcagcactgtcagcagtgtcagcagcgtttggtcctgaaaggaggcttgtgcttactggaatgctgggcgaggcggtgccagtctttcccaacggatggctcttctggatgtacatacaacacatacaacacacatgcatctgttcaacagaaggatgtaaacagacacactcacacaaaacatacacagacatgcacacatgtgtgcacacacatgccaatctaagctcagaggcttgaccctgctgattactgccttcagactgacgccaagaagtcctgccttcctcgctacgtgtacctcgccagtatttttacaggtaaagaatctgacctctttctagtagcagagctgtgcttccgatcactgcccaaagggggaaatcacgcccgcaacattctggattctccctctgggagaaaaccacagccctgcctccccattccatcccccattcccccagcgagatatcattatacagcagaaaaccacaggatccatatcagacggaaatccaaccctcaacgataaagcgacatttgaaagaatgctcaagaacagccccgtctgattagacggggaatactcatttctacagggagttatgcctccctcaccttgctgcccgcttcatccaggccaaggagacggagttcattagcagaacacatgtggcttgtctccaccattaggataaagatcacaaaatacccgcagaaacgaggacgttctgaacctgggctgcaacaacaacctctgacttgggcccaaagaaaattgcattttttctgtcaagttcaattaataaacatttattcagagcctattatttattcgggtttgtttttcagtcctgggcctctctgtcaagagtttctcctcacttcaggatgggccctgaggaaggagccctgggctgccagtgagtggggctgcagaagtcaggcctgtggaggacccagtgtctggaggacttggcactcatgtgccctgattcaaaccctaggtctgccacttggttactgtgtgatcttggataagttacctaacttctctgtgtcttggtttcataatgtgtaaaatgtgataatgatagcacctacctcagggtggtgaggactgaatgatataatacacatagaatatgagactgtatgtattctttgaaggttggctcttattattactaccatcaggataattatccggctagctgggacctctcatgtgggctccaccctcagttttcttgccctattagacttaaggcttgaagttcctccatgcagtggagtccttcccctacgttccagctttcctggagagatcctgattctgttgtccccttagcaagaaactggaaccagcccctgtgcacctatctcggccatggggtctcactctagcatgagtgccacttgccccagctgcctggtatcggcctgctgccctcaggcagagccacctactcaacccccactcaaacccactggtgcttgggtgccaggcggctggccagccctttcaccagcctcccagccccacagtgacccacgctgtggagcctaagctgtggccacaccaagtcctttgtaggtggcaggctggagatggagaggattagagagagaagatcagaaacaagcctccagtccgtgcagcaccctctgcttgtcggcactgggaggcaggcctggcctaaatccttggttgttacgcctgcacagtaagccatgtggccctgattctggcaggactgcagagatccaggtatcatgcaaagactaggatcatgcaattacaggtttactgtcaccacccccagcctgccccacagctctagaatggaagccccaggagagcaaggactctgcctgcctcatccacttcatagtgcttggaatgaagtctgacctatggcagatgctcaagaaacacttgtggaatgaacgcagcaaacacagttgccccatcctgtctgctccctgtcctcctccacccaggcgttggcactcgcttttaaggtgaggggcatcacccggtgtctaacgtggctgtggccatgccaaagttcagtggctgctacctgctggccctctgtccctcagtccctagagccaaatgtcttctctgactgggtttttgctctcagttgctcaggaactctgttctcgtcaaggttgacattggtctaacgttaagccgaagagccagtcgcatggagggtcagtggctgaggacacaggaacagcagagccaaggcgagcctccacccttctctcccatgcaaagctgaggtcaccggtaacgacagtaaacactgactgcaaacctgttctgtgccaggcactgggctcggcaccacgacctgaattatctcctttaatctgcacagcaaaccctggggtcactatgattagcatcagcctgttttgtagatgagaaagtgctggggggcagtgggttgcagactgggcatccctatgcctccccatgtgctggcccagtccctaatgtcggcgtgtggggtttcctcctcttctccccacctcgtgttaaagcaaactaaatatggcctgagaaggactcagtacttctatatctgagtccttgtggatgaaccataacctagcttaataggcaggcaaaactgaaaacctaacttactagtatgcacctgtaacaacagctgagtcttggccaatcccagcggccatccttcaaccactcatagaccgctgagtgttcaaactgcgttcaaataaggcaaacgccgagctgtaaccagtctcactctttctgtaccgcacctctgattcctgtgtgtcactttaccctttttgtctataaattcgttctgaccacgaggcacccctggagtctctctgaatctgctgtgattctggaggctgctggattcacaaatcatttctttttctcttttttgttttctcaagtaaactccatcaaatttaacttgcctgaagttctaacacttgttttcagtctcagggaaaagctgaaccaagaactgttttcagcaagtctgagtttctaccgcagtctcgtcacttatcagccacacggcttagggaaagcataccacgctcctcactttcctcttctatgaaatggggggaatagatgcacttccgtggggctgccaagcagatcaaacaagagcgcccgtgggcagcactcgtgccagcacaggccatatgggacaggtggtcagtgaagcctccactccctcctcccctgcccctcctctctttcctcctcccctcccccctttccccctcccctccctgagatgtgacctcccttctcccctcccccgctctttcctcctcccctccccacctctatcctcctcccctcccccgctctttcctcctcccctcccccctttttcctcctctcctccccctcctcactttcctcctcccctccctgagatgtgacctccctcctcccctctcccactctttctccttcccctccccccttccccccctttcctcctcccctccctgagatgtgacctccctcctcccctgcccctcctctctttccccctcccctctcccccactttccccctcccctccctgagatgtgactctgtccttcgggctacagcacaaggggaatgtgggctttgggccttgaaagggcaaagaatctcccaaacaatgagaaacttgctccactttggggtggtcttcatgcccatcctgcggggagggctgacctcatgggggtcttggttattttcaatttatttgtagaacctgaaacagagttccattcccaaggaaaaccctcatggaagcagaaataaaaacagaatgtctccctccctggcgtgggggggtcacaggatcccaaccccagggagccgcagggcccagcccaggaggggataactagtgttctttgttgaccaggaggcttaaaacactctctgctcccttgtttccattttctcttaataaataggctggtctggggaaaaaggttctggaactgtgaaaagttcccacagtgtaacccaaactgtttttgaagtgcaatatcagtaaaaacggtcatgatttggtttttggagatataggttgacctaatgagtatgcgcaataagaaaaatatttctctataggagaagagcaacacgtaactgggcagacactggacttggatctggaagaacctggatttccaaccagaacccgcccttactagctgtgtgatgtttctcaaatcactcagcctctctgagctcattttctttatccataaggtgggagtaattatatctgtgtagggaaaccgaatttggtaatggattaaagtctcagcacaagataagcatgctacccactccacaccatcaaagtctgccttctcctctcatgcagatgttttccaaaggccctgcccactgccatttgtcggaaacagaaattcactccattaacagagcagacagggccaggcacagtggctcacacctgtaatcccagcactttgggaggctgaggcaggcagatcaccggaggtcagaagttcgagaccagcctggccaacatggtgaaacccgtctctacaaaaaacagcaaaaattacctgggcgttgtggcaggcccctgtaatcccagctactcagaaggctgaggcatgagaatcgcttgaacccgggaagcagaagttgcagtgagctgagatggcgtcattgcactctaagcctgggcaacaagagtgaaactttgtctcaaaacacacacgcatacacgcaggcaccaaacaggcaaaaggtgcttgtgaggtgaagaacgccggggggtggagtgaatatgggcggggctgaggctgcccagggggcctcccagccctgacagctcctccatgggtcatgtcggacatgccttttctttttaggcctcagcttctccagtaaaatgaggactttatctcagggcccttcactttccccagtcctgagattgtataaaaacgtagctaatccttatgcccacatctccaagcaagattttgaagagcgcacagtgtctggataataggtgagcccctggggctccgagaaggacagttcccagctctgtgcaaggaacatgctgtctgaagggactcacccagcacccagcaccttctaggtacaaagctcctgcacgttcttgcccgaatcctgacacttcccacaggcagctgcattttcccaaaagccactctgactggctcttctgcttaacgttagacacgatgtcagccttgacagtaacagagctgctgagcaactgagagcaaaaacaagtcagaaaagacatttggctctggggactgagggccagagggccagcaggtagcagctacgtgggcagctcagacaagcaagcgtgcccaaaggtggcccattcagaggcacatcatccccccgctgtctgcacgtccctgagccacagcaacccagcaggccgggagctgggagggacgggacctgtcagcacctacccactcacccacccccacgtggtcgccatccatcagcctccccatgtttctggaagatgcagggaataaaatcactctgcatttccacgtaacgccggggactgtcactgaagaccccaaactgtcccttgtcctctggcaatacagttaggataaattaccagactatgtcattataattgtagtataattactgagtataattataaataattataaatcatgattatagatagtccttgacttaatgatgatgtgacttataattttctgactttatggctgtgcaaaagtgaatgacattcagtggaaagtacagtttgaattttgaagtttatttatttattttttaattttttagagacagtctcactctgtcacccaggctggagtgcagtggcataatcatagctcactgcagcctggaactactgggctcaagcaattctcttactttagccttcccagtagctgggaccccaggcacacatcaccacgcctgactaattttttaagttttaattcttatatttttttttgtagagacagggtctcactatgttgcccaggctggacttgagctcctggcctcaagtgatcctccagtctcagcctcccaaagcactggagttacagggatgaagcactgggtccagcctgaattttgcattttgatctttcactgggctagtgatattcagcacaatactatctggtaatcctggcagcaggaggacccgcagctccccgtcagccatgtgatcatgagaatgaaccagtgatctatggtgtacggtaatcaacacattacaggagacattccacactttattatgagatacgctttgtgccagatgaatttgcccagcgtaggctcctgtgagggtagcctgggctgagccgcgatgctcgataggttaggggcagtaaatgcatcttccacctcggatgggtggatggggatgtgacctcactgtaagtcgaggggcatctgtgcatacaagtgcaaacatgtacacacacacacagccctggcacgtcccctctccttgtttgatcctactctagcacggcagtcctgtagtcacattcatcaccgtcctcaggttacccacgaggaaactgaggcttggtgagggctaccgcagaccaaggacctagagctgggagcactgcctggatcccggcctgcccatgacgctgtgcctcacaataatgctcactttaatgttggggtgctccagacagagatgtctgcgcgtctgcaaacatggtagctgtggcccctcaccctaatccagcagataatccaggagggctgaggaccaacaggtggaaaaagcccattttacagatgaggaaattgacacttggaagaattaagtgactttctcattgtcacacaaataaatagcagaacctaaggccctcttccttcctatctagggccctttctcagctgcttggccttaggggaagtaacgcgcttgctccctgctccaaggcagcggacaggaagaaaatcaagcagcctcccttgcaggcccgcagctattcattcatgcatcctgcattcattcattcacactgccttgccctgcattaggtgccaaagcaactctccagtcctctccaggatgaagcctacaggctatggaggtgcttgttaaaacatcttcgccgcattgggcatggaatgtcgtgtgaatgtgaaattgggcctgcccgcccagcattctagggcaagcactgtgctctgcgggacgcacacacggaacagccaggcttcagggaaaaccctttgatccagggcccagtcatgtcctctgctctgctgctgcccccggacagacagtaaaatgtgcacatcagttggagagagaacacttcatgctcttctctggagctgaacaaagagggaggcagtgctagggccaggacaagacacaccggcaacgctcagaactggaatataagggcagttgtagtcattcgcggttctgcaggtcaggactaatggtcctagactttcttccttgaagtaaaaatcccccaattaaacctgagctgtcacagttatggctcagggtctgacagcactagctgggccgccctggcaagttatttatcctctgagttacagacactgaatccataaaatgcagatgataatctctcctcccaactcccccaggccttctggaggattcagtgttatcatgggtgtaaaaataccacacagagggggttcagtaagtgatctagggcaccccgctcattggagaaaacccaagaggggtcctggcctcgcctcctcctcaggagatggactgtcagggaagcgagcgcccaggctgccatccagttctggaggcttcagcctctctccaccgaccactgacatgccttggggcatagaatttcttcctctgtaagatggagacaacgcatgcctggccagcggagaaaaacgcaaagcagcctgtaaaatccaaagcaaagggtaaagggttgcggccggtttggtggctcatgcctgtaatcccagcactttgggaggctgaggcaggcagatcacctgaggtcaggagttcgagaccagcctgaccaacatggggaaacccggtctctactaaaaatacaaaattagccgggcatggtaacttatgactgtactcccagctactcgggaggctgaggcaggagaatcgcttgaacccaggaggtggaggttgcagtgagccgagatcgcgccactgcactccagcctgggcaacagagcaagactccatctcaaaataaataaataaataaataaataaataaataaataaataaataaaaataaaataaagccaatggtggctgtttcccgcgctcacctctgtttcagtttcctcatccgcaaaaaggtggatctgaacattgacaccacagggcagttttgagatgtatggaaatcaaacgagatatcagtggtgcaaccggccaacacacgtctggcattcagtggtactcaatgaatgcagagtttgggtctgccggcaactggaggggctgggagaagccgcggtgaatggcaggccggccatctgcagcttcaaagatggctgcagtgcaccagcatctgcctccaatgactgtcttgctatctgctctcggcttttacttggaaagatgctttgatattgactaaccaggagagcctgatgaatttgtgtcttgagagtgccgtggcagaggcatcttctgctactgcctgcccatggggctcagagggctgggggccagccgctcccgatggacttgtgctccggtgaacacacacccagaaaaggtgccacggtggggtcctgagttcacctctgaggtgggaactccctcctctattctctccacagcagggggggcaaccaaaggggctcacattcctgccgcttccttcagtgtctttgtagaagtctccgtttagtgtggtcaggaaaggcagcagagatgttagacatcaggcattttgtatacaaataattatttcataaacaaagatctataagaccattatccactgtttgaaaaatgaaaaagagaaaaacccaccctcaagcccatcaacccaagagaattctccgtatctttgtggattcctacctagtctacagccttgtgcaaatgccctcttagtctcaacttcagctcatcgcttttcgtcttgcattctccccttcctcattagatgacccacgtttttctgtgttgcttcttcacctctgtgtttaccatgtctagtggctgccccattgggaatgcctgggccaccctgttttcgtgcacactcccacgcatgtcccactgccggacacagaccagcttccacctgcgatcgcgctctgtgctgccatccgggcgcagatcctgctctggctgtggtccatccctgtagatgagccgccagaagtggtggatgccgcacaccaccccctgcagcctgccaccccaccaacttccctactgctgcgggatccgaagcagccatttgaagaccggactgtgagacaagccgcagagagagagaaaatatttgcaaaaggcacatctgataaaggactgttatccaaagtatacaaagaactcttaaaactcaacaataagaacgcgaacagccccgttaaaaatgggccaaaggccttcacagattcctcatcaaagaacatagatgatggcaaataagcatacgagagacgctgcccatcatatgccatcagggaagtgcagatccaaaataacgatgaggccagtgtggtggctcacgcctgtcatcctagcattttgggaggccgaggcaggtggatcacttgaggttaggagtgcgagaccagcctggccattatggtgaaaccccgtctctactaaaaataccaaaaaaattagccaggcatggtggtgggcacctgtaatcccaggaactggggaggctgaggcaggagaattgcttgaacctgggaggcagaggttgcagtgatcacaccattgcactccagcctgggcgacaagagcaaaactgtgtctcaaaaaataataataatgatgatgagataccactacatacctatgagtatggccaaaatccagcacactgaaccaccagatgctggcagggatgtggagtattgggaagcctcgtccattgctggtgggaatgcagaagggtacaggccctttggaatacagcttagcagtttcttacaaaactaaacatactcttgccatatgctccagctatcttgctccttggtatttacacaaagaagctgaaaacgtatgtccatacaaaagcctgaacacagatgattatagcagctttatacataatttccaaacctgcaagcagccaagatgtctttcagtaggtgagtgggtaggtaagttgtggtacagccacagtttgggatattatttagctacataatatttagcactgaataatattctattattcaatgctgacaagaaatgagctctcaagccaggaacagacatggaggaagcttaaatgcatattattaggagaaagaagctatctgaaaaggccacatgctgtgattccagctagatgacattctgggaaaggcaaaactatggagatggtgaaaagatcactcgttgccaggggctgggggagggagggatgaatagttggagcacgggggatttgggggacagtgaaactattctgtatgatactataatggtggatacatgtcattgtgtatttatccaaacccacagactgtccagcaccaggagtggtcccctaatgttaactgtggagtttgggtgatggcatgtcattggtttattaattctaaggaatgtaccctctggtgggggatgttgatccctgatccagggaggaaggagtattaggaagccaatttggctctggtccaagccctctcctccagtccagcctttccagcaatgagggtatcatcaaaagcccacatctatgctcactggctcagatatcacagggaaaagagaacgaggaatccaaagtcctgagcaatcgtgtccccttaggtgaccaagccttctgctgtgggctccccgaggcatttcctgggagaagggtctctggcttcccaagatgccatctctccagccaagaaggtgccctgggcagtccccgaggctggccatcccctctagaacctgcaggaccatggagccagctctttgcacgaggaggagccttcctggatcaaaacctaccaagataacagggaaccaggggcagcttccagggccccttcctcattctgctgctcggaactccttgtgacaaggactgagtgagtgtccggagtgactgccagctgggcctgtgctctgtgtccaggagccgcggcagggtgcccagcggggcctcttggatgctcctcctggctggcagcccctgcccggcccaggcctttttagcccccgagccaggatggcagcctcttctcctgacctcattatgtcagcgcccggattgtgtgctggggctgggctggggacaggatgttttctgcttctccaggacattgtcactctcttggcctgtgatcattcatttcagggcctcattttgttcctgaactgggctcagtgttaggattttaactgctcatctgcccagatgggggctgtgcaagcagggtctgcaagcaactctgcccctggagtggtgcctcgtgggggtgggggcagggctgcctttgcctccctattgtttccaagccagctccctacccgcacacagacaggcaggccctccgtgagtgtcctgagaccctaccacaccccagtgctgcccaggcccagcacccggggtgcgggtgtaccttcttttctgctcgtgattggctggggcacgcgactgctctgtaaaccaggtgcggggagggccaggcaaatacttaggtatgttgggccccatgccaggcaccagggcatttcagcgcctttacagctcctcacagcctggggaggtgggtattacctcatcctgcagtggatggggcatgcgcctcgggaaaggccgggactcatccaaggtcacagggcagagctggggcgccaccaggcccgtctacctcaagcccagcaccccacaccacaccacaggcctcccctccacaccccacgagcgaagggcccctcctctgccttcctctagagaaagttgccctgcttccccggcctgagcctcacggtgtgaaagaaaaacaaaatgccaggacctcaaactcaccatgccaaagcgaaagttaagctcagaaactgagtcaggcaaaaactgccttccttttcttcccaaacagatagctgcagtgtcgcatgcttactttagcttgtgtaaactgtagatttagtgagtgggagatgaatgcagaattttggctcccctcactcccttcttttcatgcgtaaaatgtagattcattgagtgccgcttcctggtcttcctggtgaggctgcacgcactctcgcctggacactgcacactccctactgcctcccccagctcattttccacattgacgccagagggatctgagcacatggccctgactgtgtccctccctgcaccaccctctatggctccccatggcctactggctaccgtccaagtgtctgagcctctgcttagagggtctacagtgtggccctacttcctttccctgacctatggcctggctctaaccccacctccctctgcaccactccccaggcatggctagaactctgctacagttctgtccccactgaccgtgcctttccctgtgcagggtcgccctttcatgttccttgtccaggcaggctctggagtcagctttcacaacctgtccccaggaagtatgttcagccagggaggtcagccaggtactctgtcccctgaggtgcacctggaaagacccacgtgcctcagcctgtcatgctgaacttttaagagcaccagaaacttctgggtggaactgtcacttcgagaccttaatccagaatatgctgcattatcttgattggacattcatttcctgtctcccgagaacgatcacaccccataaggaatttctcccatgcaagcaattaacaaagacacacaggtgacttcactggggccccaggttcctgggtctctgcccactggaattctgccactcactgtcaagaattccagaaacgggttccgatttcctaaggacatcaatggcaccagttgcacaattccatcctggggctcatagtcccctggaaaggacacaatgggacgtgggaagacaaggaaagaagagtagttctgtgctcgtgagaggcgagcttctctcttcctaggggctgccaataccctggctctcacctccgtgggaaagatccatgtatgtccacgtgtgacgtgcgcagcagagtgagcacagagtgtgagcgtgcagagaatactgggctcctgcctgatgtccaggtaggagactgagaaaggaaactaacaaagttggatggtttctttcaatggcaacttgggaaatagagcattctgataaaatgagaacaaaataatccatttgcttgattcaacactagtcacattttctgagtgctgtgtcccagaccctgggatctgggtctgtgatattctctcccagccatgcataggtggtgccttgtggttgctaggtatggtgggtacagaggtaggtgagtccctacctgggagtcaggcagcatcccacagccctcacgtgatgccctgggtgagttcatacagacgtaaagacatgagcggcctgctgcaggagcacagggcagggagatggtggaggaagagatgccagagggagacgggctaggaaggaggagcagagttctccaggcaggggagggagaccagagccccaggcagtaagtgcggtgtgagcaaagacatagagggagcaccgccagcttatgggatggcaagtgggtgggctgaggatgctgaatgacagtgacagaggcatgagaaggatcccaggaaggccagtgggcccaggctgccagtggggagctgggcttggggttgcaaaactcaggaactgccctcctgtcacacgcagggtgtgtcctggtcagagctggttttggaaagctcgttctgggggcagacacctcttcacacacagactgttctgggacacagctgccatggtgaagttcccaaagacactacggttgacagaatagtggctccccacagatagcccttccctaatccccagaacccgcgaatggttccttctgtgggaacagaaactgcagatgtgatgaagttccggatatcgagacggggagactattctagattagtttggccccagacgtaatcacaaatgtcaaagtggaagatcagatacagaagagaagtaggcgatgtggccatggagcagagactggagtgatgcagccacaagccaaggaacgctggcagcggccaggagctgaagaggcaaagaacggattctcccctggagcctccagaaggaagctgccctgccaccatcttgatttcagcctttcaaaagactcattgcaaacttccggcctcaggaacattaagagactagatctgtgttgtgttaagccaccaagtttgtgataatttgctacagcgtccacaagaaactaatacagccaccttcttgaattgtcacacattggcagtcacgaaatatctcacttggagaagagtcatatcaaagttgtctgtggtcactttggctaagtagactaaacacgggatgggggaaaatctctgactcagactttctctgggcaaagaacagaaatccatgagaaatgatttaccagttctgatgcgaaatctaagaagttaaaagtcctgctgaaatagaaaggggcttttgcaaactgcttgtaaggtcttggaataaaatctggtacgtcccctgagtgttttaggactctggctacaatgaatcattgcagcattcttcaaggtaacttatagaaccctttccttttatttcaaagccttcaggaaaaagtcctcacatttattcatgtggacgaggtccaactaagaaaagagaaagcactccaaggaattacaacagagggaatttaatgcagacggctcgttacacaggtgttggaggaattgaaaagccaaacagaggacattttaaatgacccacaggtttgcaacagcagatagtgactaccacccctcagctggagtgataagtggcaggaggttgtggggaccctggcaggaaatatgggagaaataccccatttctctttgccccaccctctcgcctgcctcctacgctcccggcaggaagtcagaagacccaggagctacagggctcagggtctgtcacatggagcagagcaggaaagaagcagagaacaaggaggcaggaaacacccagagctgggcttgcagactgagcgaggcctcagtcaccctccaactgaagagactcaagccaggaagcagggagaggatgctgggcagaagccaaaggaagtagaaggcaaagaacccctaagccaatgttctggggctggtaagggcccagccctgggacagtcgtgctgagtgcctgcctgggacaagtgccccagggccctcccctgctcttccttgaggtcctgggcacaggctccctttcagctgttctgctgacctgtttggtccttaccccccttgcagtggtcactaggactccccagagctcccttcacccaccaaccaattctggcaactcgaatccaccacaccccttactactggtagccctggactgctgagaccatggtagctggagttcccttggtttccctctccgagaggtttatttccctcctgacaccaaatgcaatggtgtcttttccatcctccttcctccaacaccaaccagaagtcccacagttcagttccatcctgacactactggaagttggtatggactccgcaggtttaaggcccagtcccccaagactgctcccaccgcagaacccagctgtaagctctgggccaccaactgccaataaatcaggggctcccacgaccgcctcctcaggctcggtgatttgctagagtgtttcacagaactcaggaacacatcctacttacatttaccagcttagaaagaatacaaatgaacagccagatgagggggtccacagggcagtgtctagggcggtcctgaggcaggagcttcttctgtccctgtggagttggggtggggtcgccaccctcctaacacatggaagctctcggaacctcgttgctgagggtttttatggaggctttactacgggcacagttgatcagatcattggcaattggtgattaaactcaacctccagcctctttccccaccccagaagtggagggtggggctgaaagttccagtcctctgacccgcagctctccaggggccctgagccaccagtcacgtcattacatacaaagacactcctatcactctgaatagtccaaggattttagagttctgtgtcagaaccagggataaataccaaatacttatttttaccacactctcattcatttaaccctctgttaatggctgaattgtgcccccttaaattcacatattgacgtcttaacccccagtaccttaggagattactgtttttggagatggaaactttaagtgattaagttaaaatgaggtcgtgtgtcctaatccaacaggactggtgtccttacaacaagagaagatgaagacacagacacacacagaaggacggccatgtgaggacacagggagaggcagctacctgcaagccaaggagagaggcctcaggagaaaccagccctgcccacaccttgatctcagagctccagcctccgggcctgagaaaataaatgtccattgttgatgccatcccaactggtactttgttatggcagcgcacacactcacacaccctcccaatgcctcaggaaacagcgactgtcatcttctccactttccagatagggaaatcaaggcttagagaagtgggctgccccaggtcacacactgatgccccaggtcacactgtgggtcagtggcaggctgggcttttctgctggcctctgcagccttcttgggtacctcctcctcacgtactcactggccccgaggcactgttctccaggacagatgcagcaaccacacatggtcccaccaggacagcgcccctgcagcacggtggcctcgggcaaaatgcctggaccaggacttggacattgggcggctgtgtgacaggcatggactctcacatgtctgaacctcacacctcatctgtaaaatggtgaggttgggtgaagatcaaaggagaggaggggcagctgagccccagcctggggccttccctggggccttccactggcgctcttcctgggaccccagctgggcgcctggccttgcatcccaggtgggtaatctggagacagtggggggctctggccctggtgctgctgagggagggaagaatctgaccctacctgtgcccctctagaggccggtgcctccccaacatctccacttcaccgctgaggaaactgaggcctgggatggtggagggctgtggggtatcattttcttagggccccagtgctagagcttaatggagatgggattccagctcagggctggtttcaaagcctctgcccgctgcaggaaggcaggcatccacttctgaaccctcggtctcagcccttgcagggcagcccagccccgaccctgccgccggtcaagactgtgtttcccaggggcctctgctgcaagggagggggtcggcacccgtccagcaccgctcgctcgatttccagccagcaccggatgcaggcgctgtgtgcccagcggggcgagcaataatcttttcgtctattcctggctcctggagatttgcctctctctggggaaattactttggggtcacagtgaaatttctgtgacagctaataaagtaacctttctgtttctggaaccagatcctggagtccgggacccctgtgggctctgtattgtatttttttctcctcttttaatctccggatgaggtgaaagaagggaatgggagtgtggctcattcccagctgaacgggacttcctggcccaggctggctctgacatttgcaaacatggagctcagggaccacggtgtcaccactggagccccaagtgatcttcacctatatgtggggtgattcaggagtcccaacttcaaccctccacttggcaaacctgggtgcggagccctgagctgggcacagaaaggcagcccagccctggggtgcagaccacgcatggctcacagcagctgccatggtggcgttccatcccagctctgccacctgacctcaggcgagttactgagctctctcagactgagttacttcacctgcaaaactagataactacaggatgcatctcgtgggcttcccgggcagctgcagaatttctgatgaggaaaagcgagggggagggaggtgatctggtttcagggtgttgagagggaaagctgcttttgaagccgcaattgcatgcagggccctgtttaccttagatggtatgttttggaggtggccctggagagggcacccccatccccctcaacttcccggacctgtcactgaggactgagtcagatgacgcgcagaatcgtctaacacgatgcttgccacataggtagcacagaaaatgttgatgccacatcattttaggactgtttgactcttgcccgggatgagtttacagaacaagagggaggcagccacacagcggtcattacaagtgcgccaaatgtgctgggcatcgtgggcatgcacagcaagcatgcttaattctgcctgggcactgaaggccgacttcacggagctggtgacattttaactgaggcacgaaggatgcgcctggcctcaacaggctgagtgggaggggagagggaggtcaacatgagcaaaatgggggcatagcaaggaccctcctggaaaagttgggggtgaggtagcccagacccctgaaaaccatcctaggaggggatgctgagtcccaaacccagatgtctggtgtttagtgctatggacagtgtgggaagtgagagagacagaggcagaaagaccagagaggaggctgcccccatcccaggcagccggtgtccaggtcagcggttgtggcgagcacggggagagggcaagaacctcaggaccctgcaaggctgcattggggggtggggtcggggtggctggaaggggagggcaggaagagcaggtgcagagggtggggtacgtttcaaagggagaaggcacagaacaccaactacggtccaaaccacctggaaacacactgtgtgttcttcccaaaatgtgccattgtcaaggatgccctagggctgactcggaacaagagctccagaatgctgagcgaggtgctgcttccctgtggcatccctgtgcagcggtggtgaccagctaagccctccttactgaacaaagaggtgggaactcaaagataaactctgctcattcctcattacccgtccaggccacagagctcacagctaacatttattgggtacttaccatgtgaagacacagtgccaagcccctggcaggcttggtaaaaactcttgagaagtgttacccccattttgcaaaagaagagactgggggtcagagaggtttcacttctcagttaaagctgcacagtggtagacggtggagctggggtcgacctggcctgcacaattgacagaacgcattcagagcctcatctctcgaattgcttgtttcctggtgatccccctccctaagatcacaaggctgtgtagaacagggatttgaacctgggactgtctattgccaagtcatatattcttaataccctgccctccacctcagtggagtataatcttgttcttttatctaattcctggtgggagcaagcctcggccaggaggtcattcagctgggagtgagccacactcctgttcctgcccttcacctcatctggtgattaaaagagaaaaacatacaatacacagcccacaggggtcctgggctccaggatctggttccagaaacagaaagcttactttactggctgtcacagaaatctcgctgtgaccctaaagtaatttccccaacctctggctctttaggacctacctgggatgaaacagggtgccaggagaggttgcaggagcagaactgagccgggtccagggagcaggaggtcgccaggatctggtccacttctatggaatccccaagcccagcaggagcctcccatgccacagttgccagtggatgagtggatgtgtggtggggaggagggtagaaggctgtatgagctgggccccagccgctatctgcccagcaaggcatgtggcctgcccaggggtcagtccagcctctgagcatatggccctggtcccactgagttctcagggcccaggccctgagggtacccactgtcccacctggatcacacagtcatggccccgtactcccctacttccctgctgctcacctggcccctctgtggccagacctacgtctccatcagtcccagggccagctccttcccaatgttcatcagccaagatgcgggagtcaagaagcaaacccagtcctggagggtgcttgtgggacgggacccaggaccccaaccagcaaggggcctggggggaggtgggatgtggggtcagcctcggctgggctgagctgctcatgcctggtctgagtgcccaccatgggctcagaggcccctgaccaccacagtgattaaacttgaggtttaggcagggctgctgcttaggcctcaaaaaaatctcagctaatgtgtcttaattccctggaagaggacctggggccaaagatgtgcaggggcacagctcctctgtggcacctgtccccatcctcagatcctctgctgtggtccaaaccaaagaattaagggattaagtgtgaagaacacagacagcacctagagaactgaagacaccagggcacttggtaacacagtccaactttacaatatcaagctgaaagcacagctctggcccctcctcaagttactgctttaagagttaaaagatacttgggttacatgagcaagaatgccaaacacctggagggggaaaaaaaggtatgtaggagctatcatattgtttatttaaatttactatctgaaaatatctgggcaagaaaagtaaacataagtgagctttccagccagatctggggtcctggtgaaataaaccgctttacctgtaggaacgcagttcatccctgtatctgactggtgtttatgtatcatatgctatggagaccacagagcaggcaacacacagctaacatgctggttccttacccaaaaataccttgaaattcctctgtatctgcatttgtaaatattttatgtaaaccagatgggtttacagaacacgtgcagtggaatctggttttattttttagcaacatgtactataaaatgcttcagaaaaataatctgtacattgagaaggaaaaaaaaaagatttctgggtctacttataaagagcgagagaatcaagaacactcttttaggaaatgctagcattagaagcatctgctcagaactgactcttgggtccaaacaagttgccttcaagcagcagtccccaaacgtggctgcgcgttataatcacccggggaaaggttacaactcctagtgcacaggcttccccctgtcccaactgcaccaaaagctctgggtgggactcagcactttagtagtttgtaaaactcccctggagctcccagtgtgcacctgcgcctgagagcttgactcagcccagtgtgcattcaaatcacctgggagcttgaacctctccatgcccaggctgtgcgcagatcagttacatcaggacccagccagcagattttaaagttttccaggtgattcaaaagggcagccaggactgggagccactccccttacaggatgtgggaaccttctgaagggatgtgactgctgatctggccatgcatgatgcatggacaggcaagagccagaggccccggcaccatcatcgcagtccagatggaagtcttgctcccaagtcacctccatcttttctctctcagccacttgctgattgaggctgagccagttaccaaagtctctgtggctcctgctccttccatgccagaccctgttgaacacatccctggactccagctccttgtctctggtccacccagagccggagctttagcctaggacccagacttctccctcctgcctcttcctttccctctcagtgaccctcacccggcagctggaggaatcttctgaagagcaagtctcatcacatctctcctctgctcaaatcctccagcagatgtgaagacacgagataagctgctggtgggaacacgccacggtgcagctgcttcagaagtcagcgaggcagtttcttaaagagttaaacatacgttcaccatgcagtgcagcaactccgctcctaggatctccccgggagaaatgaaaacatacgtccatacaactcagatgcaaatgctcatagaagcgttcttcaaaatagccccaaactggaaacaatccaagcatccatcatctggcaaatggagaaactacagtgtagccaatcaatggaataccactacatgctacaacatggatgagccccagaaatgcgacgctgagtgacagaagccagacacaaaggactggattgtaggagtccatgtgtacacggtttctagaaaggacaaatctgcagagacagaaaacagatcagtggttgcctggggctgggggaaggaacggggattgacggacatgggcaccagggcgctttttggggtgatggagatgttctaaaactggatggtggttggacaactccatacatttactaaaaatcatggccctgtccacttacaataggtgaattttatggtatatttcaaataaagctgttaaaaaaacaaaccacttcctatggctcacacaggagagagtacagcatcttgctggacacccaatgtgctccaccatctgcagatttgcctttccgggaccaactccccaggacccaagccccgtggaactctctccaggctcatgaccccctctggaattcacctcataaccaccgccagcttctccaccgcaagctccatctcatccttcaacactctgggcaaatgccgcttcctctggaagtctgcaccaccgctaggataatgcttagcaaaaatcaatctctctcattagagcagtgctttaaaaactcacactaatgggttgtgaaatcaactgtgctctaaccagtattttaaaaaatgaaatacaatagaaaagagaatgcggtgtatacagtaagtaccttatttcatgagatgactgttttcatctttcttttttttttttttctgagatggagtttcactcttgttgcccagactggagtgcagtggtgagatctcggctcactgtaacctctgcctcccaggttcaagcgattctcttgcctcagcttcctgagcagctaagattacaggtgcccgccaccatgcccagctaattttttatatttttagtagagatggggcttcatgatgttggccaggccggtctcggactcctgacctcaggtgatccaccctacttggcctcccaaaaagtagggattacatgcatgagccaccatgcccggcctactgtttcatctttctatgtgtgtattatctctatgtgtactgaattctgggttgcatatttcttagagtggcttgaggtttagaaagttacgaaacagatttcaactagacaaggcactccttgagggcaggggctgtgctctgtttctctctgtatccttgtggtcagcatggggcttgggacccagaaattacccaataagacgtctactctgtgagagtggctttgcaagcatgttgattaaaggccctttgtgtcgtatttttttccctctcacacaacatgcaaacattctttaaaaagctgtttgttggctgacagaccacaccctacagttaagactggcagcaaagctctgcaagaagttcaatgactgctgtaaatctcacttataaaactaatacatacacgtgcattttttagagtgaagatatatagcctaaaaatactaataaaataataattcaaatctaaaactccacatgggacaggctgcgtaatttgcaaaatcaaagtgtgggaccctgttcacacactattgagaattttagagggcaactgcagagccggaaaccaaattcaaggcctctcggtacaggcgcacaggggcttgctgatgaagctgaccccaaattataaagacagagatggggggatgcggggctagagtttcaaagggctgccttaatggttcttaagatcccatttcaccctgatgtttggagaaagacaaacacaaacatgcttttgaaacaaacaaaatagtcaaggaacccctaacagacgacacggggtgacgacgcggggtgatgacgcggggtgggcagaatcagcatttggctctaccacaaacctcatctgcttgtctttgggctaaacattctgtgccatttgcccagatctcagaatcccaccaaccccaacctgatggcagcaatgaaggaaacctgtgggccccaagtcatcaataacaggaggactggggttttgtggaagaaaccgtgtacttcatagcctaagcatgaccaggcagagggtccagtggctcatgcctcagtttccctgccccaaatcctcatctgtttggccaaggctttgattttcaacctgagtccccacccacgggcctggccctctgggacgtccaactgagaaaccacgcacgccgagtcctgcagcctggtcagaccccgagcctggcccctgctttctcctcttccccttggccaaggtccccagatgattaaaaaaaaaacagtctgaactccatctctctctctttgtcttaggaaagctgggatgggtgggtggtcaggaaagagggagaggcctgtctgaggcacagaagtcttatgaaaggttctgtttgctggtaattccatgaggaaaattgcctttgactggtttgtccaaacaggtttgcaaattgagatgggaacattttttaaagatcaccgccatctccacatgatttaaaatgtcatcatttaaattatgtggagcttcttttgagaaacgttttacccctgagcatgtcaaaagcaatttcccagagtgcaagctttatgaatctaacatgataggcccgagcgtctccctccctgacagctggggtcccagtctgccattcggggagcaccagcgtgcttcctgctgactcagggaaacccagggcgccaaaggggcctcacaaatcgctcagtcccctgatgattaaaatcttactttaaagcagcagaagctgctctttaaacagaaggcatctcggagaggccaggctagagaagaatcggagtggaacagctctggctggagggagcacaggcgccaagacctgacctgctgtactccccctcgccacccctgctggggaagggcctctgccacccttagaactctccagagcccagcttgggaacccgtggtctgttctgcccccctcccatatccctatttcacaagcaggggagaatgagccaccaaagggtggcctcccacggtctcaccgaaccttcggctgactccaggccggcggtttccagcaccccaggcggcctgtttccttttagttgctgggaatttaagggccctgaaaggtttgaagcagcttgtgcatctgtgtggtcccagtggggtctcgctgtcccactgccttcatttgagctctgtggcctgcagtcctcagtgggaggaagcacctgcacgtcctcaccccacccacctacagcgtttccctgaaacccattaaagtcactgcggcagaacccatgtgaagacacttaccatgtgccactttggttcaaggcaggaaacgaaccctactttctcagtgagctgcaacttcagagcctcgagcgctcttcctaaccggatccgaacgacttctactctggaaggtgattcaagaccagacacacaaaggccaaatgtcttgcagccactcagctcctctttgttcagattctggccagagttttcaaaagttacgaaaaacgaaaatcttcttcttctggggatgtccagttctgtaaattttttgttgttttttgtttcttttttgagatggagtcttgctctgttgcccaggctggagtgcagaggcacgatctcggctcactgcaatctctgcctcccaggttcaagtgattcttgtgcctcagcctcccaagtagctgggattacaggcgctcgccaccatgcccagctatttttttttttcgtacagacggggtttcaccatgttggccagactggtttcaaactcctgacctcaagtgatccgcctgcctcagcctcccaaattgctgggattacaggcgtcagccaccgagcccggccttatttttgaatttctaagcattttttttttattagttattcctgattgtataccctaatggttaaataatgggacctatgtaatttctgattttgaactatgctgtcatctaacatatggccacttataaaaatatattatgttaagatataaagaaaatgggctgggcacagaggctcacgcctgtaatcctaacactttgggaggctgaggcaggtggatcgcttgagcctgggagattgagaccaacccaggcaacatggtgaaaccctgcctctacaaaaaataaaaaaattagccaggtgtggtggcacattcctgtctgtagtcccagctacttgggaggttgtggtgggaggatcccttgagcccaggaggtcaaggctgcagtaagctgtgattgcaccacggccggggttacagagcaagattctgtctcaataaaaaataaaaaagtaaacaaacaagatataaagaaaatgtcaacaaatcccatcccccccaaatatctaggtagttctgttttattaatcttgccaaatattcagtgaggccttttgatctgaagactcagggaactctgttgattatttctttcatatttgtttttctctgttctctcctcctaaaacttctactttggatatgtgtagttttgtattagagttttcctctgtgtctcttattttcaaaatgagaggcaaatgacatgagatggtgagacagtgcactttagtggcaaaacacaggacaagactgggtgtggtggcttacagctgtaatcccagcactttgggaggccaaggcaggcagatcatctgagatcaggagttcgaaaccagcctggccaagatggtgaaaagccgtctctactaaaaatgcaaaaaattagccaggtgtggtggtgtacatctgtaatcccagctactcaggaggctgaggcaggagaattgcttgaacctgagaggtagaggttgcagtgagctgagatggcgccactgcactccaacctgggcgacagagtgagactttttgtgaaaacaaaacaaaacaaacaaataaaaaaacccacactacaagttctttaagccctttctgctttagttttccccgtaggtgaaatggggaaatataaatataatacagtagcttacctcatgtgaggattaagctacacaatgtatacacagcacttagtaaagtctctggtacatcacgtgtgttcaataaatgttacttgctatttatttctgagaaaaaaaacattgcctggctagtgctagtacctaatatcctaaacaaaacattagcaaatttgatttaaacacagactagaagaataatacatgtgatccaagtagtatttattctaggattgcaaggatggctctatattataaaatttgttaatataacttacgacattaattagtcaaaatcattcatttaagaatctttccttttcccggtgatttgaaatatgtcactataatgatacattgtactaaattattttttatactggggtctgtttcagacatttctttgtttcactgatttgtttgttcctatactggtaacatctgttttcactatcattactatagctttataagatattttaatatcagatgccctaagtgtctctcccctttgaatttttcccttctgaaattttcttggccatttgtacatgtttattctcctagatgaaatttataattatgtagtcaaattcccaaagcgtcccattacgattctgatggaaatcgtactaaatttatatatgaaactgaaaagagttgacatctaaagtagccaaccagtcatttctatgacatcaccactttgaacgacttgctacctatttggagaggaaaagtagattagaaactacatcgaaaagatgaagtacagagagtttaaatatttaactacagaaaattaaaccttagaagcactagaagaaaatatttctactattaggagggcaaagaatctttccaggatatgacaccaaagacagatgccatgaagaaacatgtttagaatcaaaaaataaaaaaaaagattaagtgaaattgaaaggcagctgagaaactgaaaaccattttgcaatatatattcaagacaaaagattaatatcttccatgtgtaaaaatcttttccttatcacctggaaggggctgaaatgtctgatgtaaaagagaaaaaagttacacaaataattagcaaaataactatgactgtctagtagcatataaaaagtctgccacctctttaattacgttaattcaaattaaacaagaaaatttttttaatcaaaaaatttccatatatatatatttttaaacacattataacacccagtacaggggcgttcttaaatagaagagctttaaaatgtgcaaagatgtagctataaacatggtcatacaatattaattaaaatagcaaaaactgaaaataatctaaatttgtacaaatggggaattttgtgaaaaatatttaatatcctaaaaagatgttcacacaagcataaaactacatgaaaaataatgttattcaatttaacaaaagaaataaacagaaaaaggaaagaaagaataaaaggaaaagaaattatatatacatatttttaaaaattcagataggatacagcccataatattaccagtgtttatcacacagaaaaagcaagattatatagttgattttaattttcttttggcttctctaaattttatacaacaagcttgtattacttctttcattaggagaaaaaattttttttctatatacattttcaaaacaggagaaaaaaaatcagaaaaatgatagccaccgctgtcatagatactatgaagtctgacatttttaaacattgctgacagcactatgaaatgccctaaacatctgatcaccaattttgcaacaaaacttcatgttttatgaccttgtgaatctatcccaaagaaatacagttcaaaatactgaaacagttatgcacatgaaaatgttcactgcaatactgcttgtaaaggtgaaaaattagaagctaaccatggtataacagaagggtggttaaatagtacacacctactgaatgactcaagagaatttttaggaaaagccttaacaggttgagagaaaaccaagagaaaatgattgtttataaactctaattatgagaataaatcatgctcatagttaagaaacaccaaaaggaaacataaaaagtaatgatggctgttaggacatagaattacacgtgattatatcttccttatttctgttttccaaatgcagctatattacctttattctttttttattattatttttttttttctgagatggagtcttgctctgtcacccaggctggagtgcagaggtacaatctcagctcactgcaacctccatctcccaggttcaagcgactctcctgcctcagcctcccgagtagctgggattacaggtgtgcaccaccacaccaggctaatttttgtatttttagtagagatggggtttcaccatattggccaggctggtcttgaactcctgacctcaagtgatatgcccacctcggccttccaaagtgcccaaccacctttattctttagaaacattatacagtcatgtgccacataacatttgggtcaatgacgcatatacggcagtggtcccttaagattataataccatatttttactgcactttttctatgtttaggtgtgtttagatatacacatactaaccattgtgttacaactgcctgcagtgttcagtacagtaacatactgttaaggtttgtagcctggggcaacaggctgtaccacacagcctaggtgtgtagtaggttctaacatctaggcttgtgagtacactcgctgatgtccacacaatgacaaaattgcctactgatgcattactcagaatgcatcccagttgttaagctacatgtgaccatatctggaagagaaaaagaagaaaaagtaaattagaccgcaagatggagaatctgttggaaggaggagaatatgaagggtgtgaagtaaggctggtagagtactgcctaggctggcagggacctttggaatgtgggggttggcaggtttaaaggggctgactcccgtttctggttggggcaatgagctgataatgatgccttaacttggagcatgaacagagatttcatggcatgtcaggaggaacccacactcgagggtctgagtgttggtgctcccccaaaattcatattgttacccccaatgcgacagtattgagaggtgggggtgcttagattaggtcatgagggctctcccctcgtgaacgggattagtgctagtcacagtccgttttgttctgttagtgctagtcgcagtccgttttgttctgttagtgctagtcgcagtccgttttgttctgttagtgctagtcgcagtccgttttgttctgttagtgctagtcgcagtccgttttgttctgttagtgctagtcgcagtccgttttgttctgttagtgctagtcgcagtccgttttgttctgttagtgctagtcgcagtccgttttgttctgttagtgctagtcgcagtccgttttgttctgttagtgctagtcgcagtccgttttgttctgttagtgctagtcgcagtccgttttgttctgttagtgctagtcgcagtccgttttgttctgccataacagaatacccgagactgggtcatttgtaaggaacagaaatttatttggctcatagttctggaggcttggaattccaagatcgaggacctagcatctggcaagggccttcctgcagcatcataagctggtcgaaggcattacaaggtgagagagagagcaagaagggaccaaactcatccttttattatgaacccactccagcaataatggcattaatccattcatgagggcagtgcccccaagacccaaatacgtcccattaggctccacttccgtatactgctgcactggagatcaagtttcccacacatgaagtctggagaacacgttcaaaccctagcagcaccctcataaacctcaccccacgaggatcagccctcagaaacactgaatctgcttgcaccttgatcttggacttcccagccttcagaactgtaagaaataaagttttttttttttttaaataaaccatgcttttttgtcacttaggttcatttcttttttctttttaaaataatttaaaaatatatataaaataaaataatggattagagatggggtctccctctgtcacccaggctggagtgcagtgttacgatcagagttcactgcagcctccaactcttaagctcaagcaatcctctcacctcagcttcccaagtagctgggattacaggccagaattatgagaaatatatttccattgtgtataaattacccagtctaagttatctttgttatggcagcccaagtggactgagatgctatcagaggaactgggaggcccctgggaggccaaccctgcctgccctgtgtctggccctgtcttcccccacgtctgccgctgggaaatggtcatgggaagcaggcaccccagccagcctgaaccctgtggttccctgatagtaactggccattcgccttctggtcatgactctgataagaggtttctggctcagagccgctacaaaccgagaggtttctcgctcacaaccactacaaacccgacagcaacgacgctgtccttcaagcctcatgaataaagctgttttctatggttggatgcaaaaagcattccccccacccccctaaatgaaggcattaaaaataatgctcattaaagtcacctcagacaggataattaaaggtagaactgtcccggactaaacacagctttcaacctccaacgatgccgcacctcccccaccccaccccacctttttactatttttcctaattagagaagtggcccgagacacagcagagcttttgttgtctggtctcgtatgtttctgagaaaattatacacaaagcacccttttgcagagctctagagacaaggcatgggcactgagtggcatccagcgccggttagtaagtgacaggaactggacttcacgcgttgtgtccaaatgcccctttcacccacgttggtctagtagccatctgctgaccgtatacccggcgcagaagaacaacacctgacctccattaacagtgtctgccacacctcagcaagttcagataccagattccaggtgacaccttgtcactgtaggacctgtttactatgaaatggcagcattccaaagccagccccggagcaggaacaaggctgatttagatgtgggaattacataccctcacggccctatggtgaaataaaacataatgccagaccctgagccctcccatccagcaagcagccctaggtatgtggccacctggtgtaggtgagaagtgtcgtttccaggtgctaagcagggctctaactgctggttgtccgcaaggatcgttttccccttcttctatggtaagaaaaacgttaggatggcataagccttcctggtcccacattcccttgcagttggcggaacagatgggagcagcttccttctcgggctcactcttgagagaaggtgcgtgccaccccgccctttcctttcttgcttcctgcaggctgagtgatgacccaggagtaggagctggagcagccagcgggggccaggagaggacatcgcacgctgagaacgagggagctacagaacagtagtaagctgggtgtccacagcctccgagccgctacaccggtgtctgtgctgttacgaaagaggaaaacagatctatcttgcttcactatctggaggtctctgtcatagcagcccaacctgaatcctaacacaccatgggtggctgaaattaacagacatgttaatagtaacaatagccagcttttgttgaatatcaaactcgtgccatgcagtagactaggtgctctctccatgtattatctcacttaattcctcacaacagcctgggaggtagggaccatttgtcctgttttacagatggagaaaccaaggcccaagaaagtgggcaacgttatcatgaactgcagacagagccaggataagaacacccagttcagggctcctccccttaccctgtgctgggtactagccctaagttagcaactttttctttctatctctaaattatttctaagaacgtactacttaagtcaaggttaattctcagcacaaatagaataaagaattataggtctctatgttattaaaactaaatccttgcagaactcaattatcaacttctattaaaaaggactttgttttcaaagcaagctttcctgttaaaaaagtggaaaagagggaaaactttaaatctatcgaacaattatttacattttaagaactggtattttcaagacaaaaccccctagaggagaaacataagatcatttaacttctaattttcttaatcagtacaattatttcccatattcctttactatttgaattttaccccaaacactctgatctctagaaatcctaagagaataagaagcaatgaaagaatttagtaatatggtcacattaaaaaattaatacaggctgggcacggtggctcacacctgtaatcccagcactttgagagcccaaggcatgcagattacttgaggtcaggagtttaagatcagcctggccaacatggtgaaaccctgtctctattaaaaatataaaaattagctgggtgtgtggtaggcacataagtaatctcagctactcgggggcctgaggcaggaaaattgcttgaacccgggaggcagaggttgcagtgagccgagatctcatcactgcactagagcctgggcgacagagcgaaactccatctcaaaaaaaaaaaaaaaaaaaattaacacggaaatcaatagttttcctatggtaaagacaacagccagtgattagatctaaagaaagaaaacatcctatttctttcacagtctagactattttattctaaaatacaagatacctagaaataaatttaagacttataatatctacatgaaagaaaagtttcaatctcctaagagatgaaaagtaagatttgaaacagtggagatgcatttcatgttcacgtttttcagtaggaaacatcatagaaataataattcttatgttaatctataaatttaatataattcacacaaaaaaataccaattaagtttgtgggcaaacttattctaaagttcatatggaaagctaaaaatgcaaaagtagctagaaaaattccaaaaagaaaaataagtaacaagggaggataagtcctatcagataccacgatgtattataaagtctaggtaattaaaagggtgacattgacacatgaatagacagatcaatggaacaaaataaaatgtccaaaagtagacaaaactgtggacaagaatttaatttatgaggaaggtgatactgcaaactaataggggaaatatatggaatattcaattatcagttgaaacaactgagaagccacctgaaacaatgaaactggattcacatttcctactttacacggacatattccaagcagatcagagtttaaaggcaaacctgagaccataaactggtctaagagaaaccaggagaaaaagcttttggaagtttgcagtgatgagaatctttctaatccaggaaccataagagaaaagactgataaaatggcctagataaaaattaagaacatgtgtatctctagaaactgccatgagcaaaatcaaaaggctaatgacacactgggaagaaatacactccattcattcataacagagcttatttctgtaatacataaggagtgccgacaaattgctttaaaaaccagcaacagaaacaaaagctatgatcaaacaatttacagaaaagggaaagaggttcaaccacactcataataagtgcactgcaaattgaaacttctccaagacacaattttttacccaaaagaatggcccagatccaatacctgttaatacatggaggtgaggggatggtgcaccaggagcataaaatagaaccttgataataaacaatttgtcaatgtccgtcaaaatcagaactgctaattgacccacgatttccactaggacctaatcagatatgtgtacctacatgtacaggaaataatggatatatacattaattccatgatattgtctgtgatggcaaaagagtggacacaactggaatgcccatgagcagaggtctggttaaagaaaccagggcacatccatgccaaggaatcccacacggcgagaaaaaccaatgaagaagctctttagagacacagggaaaggatctccatgacatgctgttaagtgaaagaaacaaggtgcagaacagtaagtgccgtatgttgtgtgttgtaaaaaaggagaacaagagacacacacacaacattatctctggagggacactgcatgaaaccaaagctctagtgttcagtggggaagagaacaggacatctggaaaccagcatacacagtgcagcctactctagccccgtgaagagatgacctgggggtatcatgttcttccagctattagaagaaagagcatgatggagcaccctttcttcttgtctcactagccactcactttctgagtcattcccgtgcctgtggtgctgttgtaagggctgggaggagactggccatgcgggtttggaatttccctcaattctgttaactgcaggattcatcctgaagcacccacgcttcagctgaccaaggaatctaccccttaatttaaaagtttgcactttcacagacttccaaagtacagagctaggagggttcttaagattggcccacagtagacttctgtggattcaattcattggttccttcagtcaaccagctctccacaatgcagatgagggcaaagatgaggatgctcttctccccattccacagacaggtgaaacgactcgttcacagtcacacactttttcagtagcagtagcagacgaggaattcaaacccaggcagtctgtctcacttctcaccacgattccatactgactctcaaaacctactccatgccatgcctgtgccagaccagagatattaacataaaagaaaaaaatagttcctagtttttcagggcctttggtctaggagcaggggtatagatattgtggccaaagtttgtaagataaaaccattttatagaaaaagtttaaatatcacactcttaaaaaaaagagacgtatttatttttgtctttgcaagccctctgtccgtcttcatacggtggagcacagaaacaattacacagaaacacaacatatggacagttaagcaacagccctgaaaagtgatcacagatgaagttaaaagggctgttttctaaaataccctgcccacccaccctcaatcttacctcaaggaccaggttaacaaagccaggcgatgtttgagaattgctgacatgaaatgaaaaagctcatagagtacttcattcaaacgttttgaaatttaaaagcctatgaaaagcaactcagatcaaaaagtgaacaaatggtcactttctctatggttatcaaatagtgcagataacctaggcctgcaggctgcgtgctgtcagctaaaaacatgcctccaggaacaggatgtgcattgctctccagtgaggtgatgccaggtgggtgggggcaggcctggcttggcttggggtgaccagaaaggaggaaaagcctgcagtctcctggcaaggcatttaacatctgtgggcctcagttgcctcgcctgtgaaatgggcataatcacaacctttgggcagaattatgagactcagaagagcaggctcccagcagtgactcccgggattcccttccctatctcccaacacacaagataaccacaggcccctggagaccacatcctcactcctgtgcaaccaggaaggcctgccagagtggctgaagagtgaattccacgccggtgtgcaggcgtgttcattaatcctttattgcgtgtattagtttcccgtggctgttaaaaaataccacaaatggtgtgggttaaacggcaggaactcattctctctcagttctggaggctggaagccggagtcaaggtgtcggctgggcctgctccctctgagcccctggctaggactgctccatccccttcccggcctgtggaggcgcctgccatccttggtgtccttggccagcagctgggccgctcctctctgcttctccccatgcacgtgacgtgcacacaacggtggccacgcagtcttgtcaggttggattaaggacctgctcccctccagtctgacttcatttaactcattacatctgcaaaagaccctatttccaaataaggtcacattcagaggaactcctgcaatctttccgggggggacacagttcaacccgtaccactgagcagtcgctgactgggtcaccgatgaaggcgtgaaaagtcacgcacgggcctgcccgtgggcccgccctaaacctttccaacccgtttgggaggagtcctggtgcagagtgacagctgggggccaggccacaggcaccagcatgggagggctgcccgcctgaccctggcatcggctgacacagcagggtggaaccccaggggggctgcagccagggcaagtcactcaactaagtaagcttaggtcctcctgtgtaaagagagtaataacaacacctggccacctgcatgaataaggcagctctcaggccacagaaccccagaatctcagcctgggaagcaccatccacccagctgaccaagcgagaatcacgggagtccccctgcatcagcctccacatccaggcatgacaccggccctccctggcatctccgccatcgcttctgtgtgtttcctctctgccacgcggacggaccgcacctcaaggccgagagctggcacctatcccctgcccacccatcccaccaggctccacgaggaggtcagagcggaggaccagccctctacagtggccctatgtctgacactggctccctcagctcgcccgcccatcaggaggaagccagactccacctaaggccattccaatcaatagaccaccgagatggtttaacttaatgaataattctcaggtgtatttcgaagaataaacaggcaagagtagctaagacaattttttgaaaaggaaaaataacaagaaagggacttgagttgttaaggtggattacataaccacatgaattgaaacaaatgggcacttggtgcagattttgaaaagactctcatataccaaacaatttcgggtacaataggagagaaacacagattgttctgcagatggtgttagaacaaccagttatatggaagatcctcaagtcatatccttccctcaaccttgccaccataataagttacagattttcaaagagttatacgtaaaaataaatgaagtcttctatacttccctaggcttctataattccatggcaaacatggattacttttgtagtgagggaataaacaataaaaatggaaaaaataaatgaagctttatattaaaccagaaggaaatacagcgaaacatgtaaccgatatcagatgggactggacaatgagagaaacagtcaaaaaactcgagagtttggccgggcatggtggctcacgcctgtaatcccagcactttgagaggctgagctgggcggatcacctgaggtcgggagttcgagaccagcctgaccaacatgcagaaagcccgtctctactaaaaatacaaaattagctgggcgtggtggcgaatgcctgtaatcccagctactcaggaggctgaggcaggagaattgcttgaacccgggaggtggaggttgcggtgagccgagatcgcaccattgcactccagcctgggcaacaagagcgaaactccatctcaaaataaacaaactccagagtttaaagttttaaaattgtactagaaaaaaaaatgataaaaactgaaaggcaagtgacaaagtgagaaaaatttttgcaacaaacgtaacgaaggattgtttttcttaagatagtaaaaatgtcttgcaaatcagtaagaaaagcaagaaaattccctgatttcccctccacagacaattcaaaatggaactataaccgtccaacaagcctatggctgataatgtaaacatgcagagataaaacaacacaccctgttttgggtttgtttggtaaagaaccattcattactattacagttaatgaaaaatgttaatcatggtgcagggatacaggcccttccatgcacaccttgttccaaaaaaggtgtgggccacgtgtctgaggcacttaaacacatctactctctttcactatctcacttcagtctaagagtctggactaaaagattgaacagaaataaaagtcaaaggtgaagatgtttatcacatcattctttttttcttttttcttttgagacagagtttcactctgtcgcccaggctggagtgcagtggcacaatctcggctcactgcagcccctgcctcccaggttcaagcaattctcctgcctcagcctcccgagtagctgggactacaagtgcccgccaccacgcccggctaattttttgtatttttagtagagacggggttttgccatgttggccaggctggtttcgaacccctgacctcaagtgatccgcccatctcggcctcccaaagtgctaggattacaggcacgaaccactacgcccggccacagagttctttataatagcaaaaatttcaatgtaatcttaatgttcaaaagtagaaaaaaattttacttcaaatatggaatattatgcccccattaaaaaggttttccttaataacaaaaagaagtgcccaaacaaaaccaaaagccacttaaattgcgtttggtaacacaatttcacagattgttggaggcagtgctgtgattatcatcctcagactgctgcatgtgtatcatggaataaagcaagtgagttaggtgctgctgctgagaggcaggattttcagccagagtaaaagatcatgttaagtaaaactaggtagccttgaatttaaactgaaaacagcagcatgcacttaagatgcattttatcttaaaaacaaataggcaaacgttttctagttctgtgctgaaaaggcctaataactaatgagtttcaatgggtatccacagcacccatattcactgtggtctctatatatttcctctttaaaagaacagataaggtcagtctggaccatcttgtcatagtggaagcaaagaaactaccagggacaattagggtcatgtcaaaaggactcacatgccaccctgaagctcccaccgtccaaagatgagaacccttgggtgtcagtagaaataactgcgattgacctcacttctggaggatgctgggaacaaactcattatttggaaaattggtaaataagggagaaaaaataaaaacatccatcctgctgttcctaagtgaactgtaccacagggtagctgaacagtggatgcagggggcgggggtgcagttctctttgtagaagtattccagataataaagaaagaagagtaacagagccgggcacggtggctcatgcctgtaatcccagtactttgggaggccgggtggatcacttgaggtcaggagttcgagactggcctggccaacatagtgaaactccgtcttgactaaaactataaaaatcagctgggcatggtggtgcacgcctataattccagctactcaggaggctgagtcatgagaatcacttgaacccaggaggtggaggttgcagtgagctgagattgcatcactgcactccagcctgggcaacacagcaagactctgtctccaaaaaaaaaaacacaagaaacaaaacaaacaaacaaacaaacaaaaaataaacaaaacaacgaagaagagtaaaaggatcaaaataccattattttacaaatccttatagaatggatctgggcaagcatgatcaacagcagtgaacgtcacaaaaaggaacaccttcattctgtgcctcctgtggggcgtgcaccccaccacttaatattcttacccccaaaaccaaacctgaagctcatgcagcctgcagatctacccaccagtttacaggaaatacaggggcagaggaatctattaaatgacaccacaggaagacaatcatcaaaatccaggtggtgggaaactccaggacaagggactgagttttctcaacaaataaattgtaagaaaaaattaaagggaaggaggcaaaacctgtgggctaaatcagacttcgcagactcaagaaccaatcacaatatgggaaccttgactggatcctgattcaaaccaccaaagaatcatgaaacagttggggaacttgcacatcaactggattgctattggaaattaaatatttgttaatttttaatttgtttacgtgtaataaatggtattttggtgattttttaaaatgcctttgacttttaaatatttatactaaatatttgccaaaacaataaacatgtctataatttgcttccaaattacccaggtggctaataggtgggaaacaagatgtttacatatgaaacaagaagaattgtgatttagtaattgcagaaaccaggtgactggtatgtggggctcacatcattctactttcgtacagtgtttgaaatttttccataataaaaagggggcccgggggcagtggctcacacctgtaatctcagcactttgggaggccaaggcaggtggatcacctgaggtcaggagtttgagaccagcctggacaacgtggtgaaacctcatttctactaaaaatacaaaacttagtcgggcgtggtggcgtgcacctataatcccagctacttgggaggctgaggcaggagaatcgcttgaacccaggagttggaggttgcagtgagctgagattgtgtcactgcattacagcctgggtgacaaagcaagatgctgtctcaaaaaattaatataaaaagggttagaagacatttcaaataagatttttttccctaaacaatttaatgacatggagaaatgttcatgatatggccaggatggaaaaaagctacaaaactaatagagagtgttctgtcttgttatacgcacacatacaattttgaagccaaaagaagaaaattcaatacgatgttaataacaactgttatctctttatggtggtataatgggtgtttttaaaatctccttctttatattttctgttttctattatgtgtatgccttagtttataattatagaaatagatttttaaaagcatcgaacctgggatttgttagggaaagcccagctgtgatgttcatagtgtgtttatttctgcttttcctaatcacttccaacagtctcctgaacagccaagaactcagaggatttgccatgcagaacccccagattttatcaactaaacaattcacagcagacctactacagaagcaccttccccaggcacagacagatggcacccacagttctttaccccaaggggaaaataaccacaaagaaaaaagcccttggcaaagatgagcatggcactgcccatcccagtaggatggaccagccgtctagccaccgagacagggcagtgccaggtgggctgctgggatctgtaaggaaagctctgtcaagtggagaaaataatcctaataacctgttcatccaaactgggaaacatcatctgggctctcagaagagcttctgtgagagggcgaaatagtaaaagatgtccaaatcctggtgtggctctctcctcttctagacgggaaaacagctttcaggttcccactgttgagcagcctcggcttcccagatgctttccatgcagtctgacaagtatcccaccctagctggctgccttttgcttccagtgaaaatccacggaatccctttgccctgcttttcttatcttatgcctgttcccctggcatgcatggacattttttggcctccacattttataaaaggtcttaccagccgtatgttgctaggatatatggacaaaaataaaaaaacaagccccagaccatgctgccctgtggtcttcagtcagtgcgggagggaagagagacacccaagattgccccttcccctattctataacattcaagttgtgggggtctcagctcatgcccccattttttttaaacgtaaagaaataaatagcataaactcccatgggaaagtcggatggcagccctttaagagagctgccctctaaggcaggttggggaacagaaacaagccactttacatttttggcagcaggaccaggggacttccacgaaattgtgcagagatgggaactggctgcagcccaggagccgaattcctcgtgctgcttcgcccctcaagaacaagtcacttctcccaaccttgtggccacaaggactctccacaggagcatcagtgtgtgcccaggctggccaccgccacgagtccagcctggccatgtcctggtgacctctcctagctgtaatggctgtttccaccacaaggggcagccgcggcaaagacaggcccatcacccacaggcctggaagaggagctgagtagagtcaggccaagggacctgccatccccagtgcctctagctttctcaaactgggctctagcagtcgctgggcctggttagccacagggagagtccacccaaggagggcctattcggcatcatggtgagcaggcaatgccctctgaaagtacaaaccattttttaatagcttagataactgtgggaatgctttgagggtattttaaatgatttgtctacttggagagaccggagtagccagcatgcaacagtccttacaaacagaagctcctgctggctcacggccttgggcaatttgcctcagtctcctcacctgtaatacaaggtagagaaccatattcacctaacagggagtttgtgagaggataaaatgaagtcttggcaagcacacaacatgttctccgtacatattgaggacactggtagggttttttatcctattcgaaataacaggggttcaagacagcaatggcatgttggaggaaaatataggggtgcaaattggagaacacagacaatgaattctacacaagttcaagaacagaaggaaatgtcagggaagaggcggatgagttgtggtacttcaaggagctgccgcgaaagttcctgcccaggcaatcagacggtgcactgcaaattggttttgagttggtgagtttgcacagcactgtgttcttggcacccagcacagctgctggctcatagtaggagcttattaagcattttggaaggatgggaggaggggcttgtgatataagtagccatctactcaacatttcctctgtgccatgcatggtaaacatttccacataatttaactctggttttattactgtcatttcacagatgacatggagtctccaagaggttcccccccacccagcaatcaggcccaatccccaacacagcttttaaacaaaagcagctgaggcatttactctggtcagtaatgaaaattcaacattcttctgtcactgatgtaacttatagggtgcttttcatattgattccttttatctttgcatttgaggctaagataaacctgtatgcatttaacttacttcagtcatttaaaggaataaagaacaaaagagaagaatctgtattaaatcaggcacaacaagaggaagcatttttaacaaaacattatgttaagagcttcgagtttctataaatcacccccattgagtaatccccaaattactattgttgtgctattcagtatcctccatccataacagctgatgaaaatgcacgaccaggccaaatacaaaggtagaacaattttttaacttaattttgactctgcattactgaaacaacaaaaacaaaaaaatcaaaaccttccgggatttaacaaatttaactacaaattacgagtcagatcctctcaacaattagatgcctgtagcaaaagaacgtttcccacatcaaatttcccagatttttcattaacaaatgtccccatggttccgtcttcagagctggagccaaaatggaaactggtgtgaaacttggtgaaaatttacggacagcagatgactgcggaacgaggaggagagaaacaggaaggcggcgtttgctctttatttggaataattagcaaagcagaaccagctgaaggctggcaccatgtaccttacccaaaggttgcaagggctggaatgtgcaaaggccacgtcagcagatggttaggtgcaatttcacgcctcaccgcgcagcgacacaaagggaactatttttttaagtgcatctgaacttcagcagcacggatgggcttttttgctccaaagattccagttatcttgagagctgcatacccttaagctacaagcaccgtttttacttcaggctaggtaagatgcaagtaaattaaggatttctttctattctttccagaaaataaataagcatttttgaattttaagtgtttcagaaaactgcttttcatcagatgtgtggaaataagtttcttttctgagaaaggtcaagatgtatgtggatttggtattctcttcctgggctgaggccgtgaggtggagtgaaactgttaccgggtctggaaaggtgtgggagtaggatgggaggaaagggcaggaaaagatgcaggaaaaaccacaataatcacgataataggagcactccctgcatgccacaccttgtcccccgcactttggaaaccgccactgggaccccaacctatgaggcaggtattgttagtgtctctgctttgccgatgaggatgccaggggagaagaagttgatgaactcactccgtcacacagctgagaggcgagcgggacacaggcttccccaaggatgctttccaaatgtgcacggtggcccccagccctgccgcggtgtaaacacagggggtctggatgggaacggacgttttgtttataaacaaggaagagctcaaacatctggtcctccctttgtggctgcggacactgtgcaggtatgagccctttggcctgcctggtccatgcagcgtaaataccaggaggcctgctgctcttcagaaaccagcctgggcgtgcagagacctcaggctgcagaacgaacctcttgttgtgggcctcccggccgggcgtgagcacaaccacaggctcatggggagaaatctgccgcctccccaacaccagttggcaggagctgttcacctacccccttttactgccgtaacatacacataacacaaaatgtaccatcttaactacgtttaagcgtacagctcagcggcattaagtgcatccgcgataccttgtggccatcaccacgtcgactgccagagctctttcatcttcccaaactgaaatgctatacccattaaacactaactcccgattcggcactcccacagcccacacccaccactctactttctctatgaatttcactactctagggacctcctatgcgtaaaatcgtgcagtatgtatccttttgtgtctggcttatttcacttagcatgatatcctccaggttcatccctgttggagcatgcatcagaattttcttccttttaggggctcaatactattccatcatatgcatataccacattttctttatccattcagccgctgatggtcacttgagtggtttcaatgtgcacgtaccccacttagacacaataaatagcttcttcctggtgtaacacacatgattacaagcacgttgctattcgtaaggtccagccccaggttacctgtgaaggctgcggccgtcactcagccctgacgtggaagtgcaggaaagccggctccgtgctgctagagcttccccacttcaccattaaacaatagaaaaagctggatttttaaagggcacctaaatttttaaatggttaatgattcaaatgctttaagacactgcaagccaaacaaaactgccccagatgttgggtgtagctctcagatcccgtgaggcctcagccttataacaattccatgtggcagagttctgtagatgaggaagcagcgcttagagaggttaactcagttgcccaaggtcacacagtggctctgtgcttgaacggaagtcttcagctctaagctcagtctccttccagaatgccactgctgcctatggaacaacgccttgtaaatgacaacacggttttgatgcatgatcattaacatggatgaagaggtagctttgagtagggccctaaaaatagttcacttgatttaaaaatcatatccaaagcccagccaggtggggccaggggtcttattaagtgctcctgacctcccagtggcaaaagaaaatagcatttccaccttcacagccttgcacagcgtgtacacggaacccatcagaaaacaggggtcggccttccagttgttaatcagaacgctgacaggtgaaagcttcagaggctgggggttcggagatcctgcagcgagctctgggacttagaacaccaggctgtcgttaacccctagggtgcaaaagcctgacattctttagcgtgaccggactccctaaaactggagatgctgggctcctctggagcaaggagggttaaatggtgcatctgttttctctctcagaaggtcaggaacccaggcatgggtttaaaagcattcttcacacagaggcagataacccctctgacatgggcctccgagcaagcctgctgtgcagcctcgaggaggccctcctggtggacaggcccacagcacccagggcaagactgggccactttcagagcctgaaataggaagaggcccactctggcctcagcgtgctttctgcccctctctagaatattctagcaggctctgagccctttggtgtcgggaacgcagcagtgaacagaagagcaaagtccccgcggggtggcggtcacgtcctcacgagatggggaggcagagtgatcgtgctacacacggtaaagaagtagactgtcctggggattcaacagcagtgagtcctctgagggactggcgtgcaggggcagggagatgtggggtggtcagtaccaaccagcggtggtgtggactcgccgcttgcctggcttcctgcctgctccggatggcgagtctaactcagcgcacacttcaggacacaaaacacagtagagcctcggggtgagtgcacctcaaggccatcgtgtccacatcaccctggtccctcagtctcccctctgcgccacctctttcctgaatcccatcctggtgaacgacccccatgaatctcatcttgggagacacacatcggcctccaagccgtgggcctcagaggcattgcaacgcaaactcactcccatcttcgccggtgttggaggccttctaaatgcctctccagcctcctccctcctctcggcctccacttccacatctttaaaatgggggcattgacaggacctgtgggggtggtgaggatttgatgcatctgcagagcacagagcagcgcttgctagccactggtagtagcaatggtagttgtcaccattgctgttgacatagtagcttgttttgaaaaagtcaagttcttttttcttaaagccgtcacaaaagcaagcctggacctttcgtcctgtgttgattctaaggcttcctaagctggaaggtcccagctctcaaactcagctacgggaaactgagacaggtctgcgcatccctggccttactactttccaggggccagaggaacaggatgtgaggcagcaccctcaccttgagccctgatgtcagaggccccaggttctgggtctcaccagtccagggacccacgtattgctgtttcctgtgtccctgctgctgcgggggatggccctgcagcctgcagccccttggccatgctggaaaacacctgagccatggttaccattcatctggagccaaatgggtgtctgtatgggatccattacatttccagcccagctgggaaggactgttggagcagctctggccgtgccaggctggccaggtggaaggacagccacgtctgggggtcagctgggcacacggaagtccgaggaaggcagcagaatggatactggagttaggagatgtcgatttgtgtccctagcctagctgtgtgactgcaggggaagccacagcctcagtttccccagctgtaaaatggggataatagtccctgtgttgttgatttattttggagaataagtgacattatatgtatatatatacgtaaaatgccgtggcagcacatacaactgctgttacgacgaggttaagttggagaaactcgtgagaaggtgagttgagacatgtggactgaaccctgagctggggtccttcttttatgtcccctcacttgcacagggagctagctcagtattctttttctgacctgacatctttagggacaggaacaggaacttctgctgcctgaaccactgaggcctttgggaaggtctgggacgctgacctctccttgtagaaatgtgtgggtcttgcccttccctgcccctggtggagacccttccacccccttggccagcagcctctaagtgacaaacgctccctgactctgctctgggccacgctaagctgggggctggtgatgcagggtgaccctaccccactccctgccttaggaagtgtgttctttagccggactacacggaggcagtttgtgtagagtgcaatctgtgctctaatagctatgtgtgttgtcttgtttagggggcggtagtcggagggaaccacagagaggaggtccccattgtgcgagggtttgaaggatgtgtggaaattctctaggtctctcaagcttgcagctgtgtgttgccaaatccccaccccacggcacacccgcttcgtgatttctgccagagccacagacctcttctcctagtactgatttaattctttttaattgactcatttttaaaagttatttttaaagtaaacattatacactatggtaaacaaaaaaccagttccacttgccaaaaatagaaagaaactctaaaaataaatacaaagaagggaagttatgaaattataagcggatactgcagcaggctggagtccgaggcctgccttccatgctagtgacaaagggaaactgcaggcgctgcagaggcgttagcgacacacgggccccaacaggagcctttctcctgacaccactgagaaggaactggaaggcggcgatgctctctggagcggacaggcgtatttaatatcccacccacgcatcacctaacagcctctggggcggtgtgttccttatgttgggagtggtttccatagctggaaaagatggtgagaaatctgagtgccagaaagagagcgccggctttggggtgtgcttgtgtgttcacggaggatgaacacacccacccagaccccacccagaccccacccagactccagccagaagccacggcaagccgccagtgtcgagcagagggcccctgcaggaagatcgggaaggtctaaatccaagctcattaataggccagagggtgagagagaacacggaggtgcaagacagggaggggatggaagccagcacgtgggtcaaagggcgatggactgggctaggggtcagtgtgatgatggtgaatgcaagaatatcaacaaccacggctccgtctcctgtgggctagacactgcctgcagggcacgagatgattatttcgtttcatcctcaccctgcctccctcatctgctcacacccaggcctcacccggccccgtccctctgagctgacctcaggctgcaggccacacgcagagcagcttcccctcccctcgagtccccccaggcagcctggagggaagggccgggtccgaggtcacggagcctgcagctctcctcaactgtgttctggggcacaggaccccacatttaatttataaattcccaacttttcaaattaaaaaaagtattgtggtaaaatatgcataacatacaatttcccatcttcaccatttttacgggtacagctcagtgcatcaggtgcattcacactgctgtgcagccatcagcaccctccacctccaggacgttttcatcttcccctgctgaaactctgcacccattaaacaccaactccccactccccccagcctgtggcacccaccatcctggtttccgtctctatgaatttgatgactgggtgcctcacataagtggaatcatatcgtgtttgtccttctgtgtgtggcttatttcactcagcaccatgtcctcaaggtccgtccatgttgcagcacgtgtcagaatctccttccgtctgaaagctgaaccgcatcctgttgtgtggacaggccacattgtgtctatccattctgataaacacgtgggttgctcctaccttttggctactgtgaacaatgctgccctgaacctaggtgtacaaatacctgtctgggtctccgtgttcttcctttgggggtatacctaggaggggacgaattcctaactttgaacatgattaggcaggagcttgttacccctgggacactgcgcagtgagcaggctcctgcggctcctctcccgtccatccctccctggtcccagcctggcctgggagatgcacatccttcctctgagatactgttgttctaagccccaccacattctacgaagctccatcacacacacatgctgaaggctgaaactccaattctgcaggtgcatcagttccaagagtagatgttcgatggtgaggggccgatgggcagtctgtagctggggccccggggaaagaccacagctgagcactctcgggggagctgggctcccccgggcagctggcagctgggacctgccttcatgtccaaccacatttctgatggagcccaggggacttccgccagtacctcccctcttcagagagcccccgtcctgtctgcagagccatcaagaggaccctcgccgagggaagctgcctgccgctggtgataaccagaatcggtcgtggggaggaggtggccattccccctgaaagtcctaatggtctcgcagggtcgggccacggaaccgtctccaaccactcatcccctgtgcagaggccagaagggagctttcgtcatgctaactgggtttgatttttatcttcccaggcacctcctctcactggtctttctcatggcaatcatcacagttcatttaaaagtatttccaccccatttgtctaccggtgcaagcagtcactctagccagctaaatcagtccctttaaaactttatcttgctaattccaaagtactccatcatctccatatccagacactgagaggctcagcctgcagacatctgcctaacagagcagctggcgggctaaacacataaattaatgcaaagtcctggttggtcaacacctggtgcagctcttcctccaggcacttctcagggacgaagcttgctttgagctggccatccagcgtctgtccctcctggtccgctaccgtgagctcttgactccacctggctccacgccccctgccccatgtcttcccttagccaggagccagtgtccttgggcaagcacagtgcccataagccgagcagacccctggaaacccaccgccaattagaactgttcctcactggaaagactgcctagacaaaccacctaaaacccaggacgtgaggactcccagctccccacccagaccccagccagaagccacggcaagccgtcagtgtcgagcagagggcccctgcaggaagactgggaaggtctaaatctaagctcattaacaggccagagggtgagagagaacacagaggtgcaagacagggaggggatggaagccagcacgtgggtcaaagacgaggccatgggggaaacacccgctcatacgacacaagcatcctgcctgctgggctggaaatcccgaaatttccccagtattcctggaagcatcaaggctcccacagaatacagtggcacttcccataagacactggacccagatacctcctgtctcaaggagcccaccgcctccagggccccactgagcggccgttcatgctgagagctgcgctggagaagcctgtgtgaaggctgctgcggtcacctgggaaccctcaggagccccagagtgtgcacttttgtccattcctaaatattccttccatagacttactgtgaagatccaaccagaccctctgagctttgctaactttcagctctgtgcagtgcacgaagtggttctgaaaaagcatctgctccagtgcctggctgccttgggatcacctggggattcctcgtgtattggtcaggtccctgcaggaaacagagggcaccccaatggctaatttgcagagcagttaagagagagttactcaggaagctgtgcacaagggacagtgcagttcccagaggttggaacagtgggtgcatttatcacccctgagtaatcatgcgttttatgttttctttctttttttttgagacagagtctcgctcttgtcacccaggctggagtgcagtggtgcgatctcagctcactgaaagctcagcctcctgggttcaagtgattctcctgcctcagcctcctgagtagctgggattacaggcacccaccacacctggctaatttttgtatttttagtagagatggggtttcgccatgttggccaggttggtcttgaactcctgacctcaggtgatctacccgcctcggcctcccaaagtgctcggattacgggtgtgagccactgtgccttggcctgctttttatattttctgatgctgtgaaacatctctgggccttgctggccagggagagactcccttcctggggctagctaactcctagagatagcaagcaccttgcctttggacctgcctctccctatcaaaccaaccaagccaaagctgtgccccaaccacccgctttatgtaactctcacacccctgccctcatcacccatgggccaggtatgtgacagctagagaccagccctgtagcccagagcccactggaattatttgaactggccaatccgaaccctgctcagcttgcctcgcccctcccttcccacagtccatgccccagctccttccaccccctgactgactccggtgcttccccatatggtcctgttgtgctgtcgaatcgtcagtaagaaactcttctttcaagcagttgtctccatggttgtcatcttaatccatggctgattaaaatcctgggtgcaggccgggcctggtggctcacacctctaatcccggtgctgtgggagctcaaggagggaggatggcttgacctggggaggtcgaggctgcagtgagctatgatcatgccagggcaacagcgtgagaccctgtcttaaataaaaatcctgggtattgtttaaaacaaccccaaggactgcaggcgctgaagagaggaagctgcatggaaaagctgtgggaaaggggcttgaaggaacatccctttgctgatccatcctgactctcagtcgaatcaactgagacccaatggggagccacagtctatcccaatgtgcacttttgtcccaatggggagtcagcctcctggggcccagagcaggtggataagggtgtggggcgcacctggaggagcaagtgaggtgccagcatgctttggttctactccaagaaagtctgattccggagttcttggatggggcccagtaatttttcttaaatgcttcccagctatttctgatgcacagtcagatatggcttatacattatgaaaggtaaggcactgtcaatattaataatattagcaacggctgcagcagcatccatgggtgccaggtgcttataatgcatcagtcctaatttccaccccttaaaggtaagtgttagtattcccattttgtagatgggaaatgtgaggctctggctgcttaagtgacttgcccagcatcgcacagcttgtcagtggaagagctgggatttttatccaaaagccagtgaacagtcagccctccatatccatggattccacatccacggtctcaaccaaccgcagattgaaaatatttttaaaaaatacacaggcaggacacagtggctcatgtctgtaatcccaacactttgggaggctgaggcagaagggttgcttgagcctgggagttcaagaccagcctggacaacagagtgagactctatctctacaaaaattaaaaaattagcggatgtggtcacacgcacctgtgatccgaactactcaggaagctgaggcgagaggatcgcttgagcccaggaggtcaaggctgcagtgagctgtgactgtgccactgcactccagcctgggtgacagagcaagactctcttcgccatccccccaaaaaaaatcataataaaaatcacaacacaacaaaaaatcatacaaataaaaatacagtagaacaatatttacatagctttcacactgtatcaggtattataagtaatctagagacttaaagtatgagggaggatgtacttaggttaaatgcaagtacacgccatttgactttatttttgtagagacggtctcactctgtcacccaggctggagtgcagtggcacaatcacagctcactgcagctttgacctcccaggcccaaatgaccctcctacctcagcctccagagtagctgggactacaggcatgagccactacatccggctaatttttttttttttttttttttttggtattttttgtgaagatggggttttgccatgttgcccaggctggtcttgaactcctgggctcaagcaaaccacccacttcagcctccctgagtgctgggattatactatgccattttatatgagggatttgagcatctctggatttgggtacctatgagggatcctggaaccaatgccctgaagataccaagggacgactgactatactgtttctactcttccaacattcacctatgatcagccttaccctagcgaaacccctgcactcccaaaacctcactgagtgggcctctcatgaacgctgacactgtcatccagcacccctatggggttttatttatggttgctttaaaaagaagcactttgaaagcttcgaaagaaagatgctgaacaaccagaccagattatgaattttgtgttcaaatgagttaatttcccttaataggggtcaaatcatttttatttccctgcaacctaaagaaactgtgctgagctttaatgtagacacactttacccacctcacccccggccacaggaaagctgacgtcatcaagagaactgagggtgttcgcagcaaggaacacggagttactctgaaacattctccagagcaagagttcttaacctgggctacaggaaatcttcacaacccttaaattacacgtgtgacttcccatcaatgcgcagctctgtccaagtccttggctttcatcagactctcaaaggagcctcagaaagccagaattttgtctcagtttctctcatcattgattttaagggttatcccgcctagttcttctttccttgttttcagtgaaactgtgacctgctccaaaaacacgcagtcagtgaaatttagttcccaaatattttatgataatatagcagtgggctacatataaaataaatggtaaaaggtcctattccttggtcttactcataactaaataattaacttactggatttcatttttgaggtttttattgaaaatatttcttcctaaaacacagtatcttctctctccttgtgagatgtcaaaaaaaaaaatttgtattgaaacaaatcagtgaatttgtcgtatttctttcttaacctttctaactgtagaggaacatggcatacagaggacttatctttgaacacgtttttactaaataaatattcatcgattcactcagtacatttttattgagtccttttttccaggcaccagtttaggtacaggggattccaaagcaaacaaaagaaaatcaattgctcccaagaagcttgcattccagcagggaacacagattataaaccataaactagacagaacaggaggcggggagcggatagtaataagcactgtattagttttctggcttaaagcgacagaaatttactgtctcattgttctggaggacagaagtccaaaatcaaagtgtgggcagggccccactccctctgaaggcttaggggagagtccctccttgcccctcctacattcctgtggctgccagcaatccctgccattccttggctttgtagatccatcactgcaatttctgccttcacagtcacatggcagcattcttcctgtgtatctgtctctgcgtctaaatttcccttgtgttaaatggacagcaatcattggattagggcccaccctaatccagtacaacctcatcttaccttgattacctctgcaaagacattctttccaaataaggtcatattcacatgcaatggaggttaggactttaacatatcttttgggatatgttaaatttaacacataacatgtgttttgaaaacaaaattaagtggccatatgggagacagagagtgatgggtgctggcatgtccaggagggcctcttggaaaagatgccattgaagcagaaaccaaaatgaagtgaaggaatgagccatggggacatttggtgaagggggtacaggcagagaccccgaggcagaggtgctgagcccctgtgcctatactcctgactctcagaaactacaagataataaatgcttgctttgtaagccattatgttttacagtaatttgtttgcggcaatataaaatgtatgcgattacccaatagtggccttgcctgttgtgttagttttcggttgctgcataacaaattgccataaactcagcagcttaaagcttaactcacagtttctataggtcacaagtctatgctcagggtcacacgaggctgagatcttggtgctggcagggctgtgctccttgttggagctcagaggcctctttcaagcttttgtggctgttggtagaattcagttccttgcagttgttggacatatgcccccttttcttgcttgttggctgggggccactcatacctcctggaggctgcccacagctcctggctgggaggacccctgcgaaggcctctaattcttcgaattccttggacatcgtctatctctgatctttagacccagaatcaaaggactcatgtgattaggtcaggcccactcagaataatccccctttcggcaaacttgaagtcaactgattagtaaacttaattacaattggtgtggacacaacagtgactccatcttggacgctaatctgccatgttgaattctgattagccctagtcctgtgaatgtcccctgatttctactttgtttactgtccctagtgtaagaacatgtcaaccttgatgctactccacaaataataggcgtcataataggaaatggcgcatacagcatgcctgccgttctgtagggctgcctcccactgtctccctggagcacatacccctttcccagcggtataagagcccttggtctgttgagtaacagagtggagatctacctgtcctgcagccacccaagaccacgcttctgtctgtaagttccccaataaatcaacctttactgacaatctggatttgtgtgcctcttctttggttttttggctcctttggtatttgggggccgctttgccctttcactgaacaaatggcaaattcccttatctatataatgtaacataatcatgagagtaataccgcatcatatccacggacctgcctacacttaagggaagagaatacaaagcgtgtgcgctgggggcaggaatctcggggctgtcttagattctgcctgccgtgctcctcttccactgtggcgctgtaaccagcagcattctgtgaactccacaagggccctggatgtgcgtggtgtgtgcctgtcaacaacatgggcggggccactttggccagatcagagacagtgccagggcccactggctctgtgccagccaccatgctagggacctcctaggtgcaatgtcatctcatcctccctttggtgcagacactgttaacttctctgttatgcaggtgagaacactaagactcacatgacttaaactacttctctgagattccaaatataaagtggtagagccagggtttgaacccaaagtgtcagaaagtcaggtttccaatcctagctttgttattttctacctgtgttacccaactcctctggcctcactttgcccatccctatagtagggttaacagaatatgtggcttcggatattctcaggggctgtggaaggggctctgtaagcaatgacggctggatctgcctcatggaaacagtaaagcgccataagaggctgagagatagcggctgttgacatgactttgaagcacttttatttctatttactggaagaggttgttttcagggcaacccaaggattcagaaaacaacgaaaccatgaagtcatcttggggctcacagagctctgagcaggagaaacagggactggggtttggggaaggcatcaactcatgctatggcagaggcagagaggcttgtcaggcatggatcttccctgccccactggagtcacagaatcttctagttttacccatatttatgcagggtgctgagtcaccaatgtaacccagcaatccatcttgactgaaaacaaatggcttgtttaaatgaaaagcagacagcagaagcagaacgtcctcaaaagagtgtctttcatgtctccttattaggcgccagtgggtcttttagacagtttgtacccaaagggagaagtggttaatcactgtgcatgttgcctaatcaggaagcaaaaaccttgaaggacacccgaagttcgtgttagaaatgcaaaacagcctgaaccctctgcgagtgaaaacatgtatgtgtgcaactgtcaacgtacccctccttccttcccgctcttccctggagaaggtagaatagggagaggaaagccttgttgaaatacagcccgagtcatttgcttcacaggctgggattctttcggatgctggtgctaatgggtgaagtctgccactctgatgcttgcgagagccgtaggaggtaggagtgattgaccccatttcacagatgagaaaattgagacttagacaaaactagacatgagaaggcaggtgccagttatcagagaggcagcctcctcctaggcccttcatgccacctgagggaggtcccagggtgtgggaggagggagcatgggattctagcctcggagagaacaggcagggaagaggctgggcctgggtggggcggtcctgcagggcctcaatcagttgagccagacagtgcctgcgggcccccgacaggcctccctgaacctcactggagcattaaagatgaaagccccttccgagctctgtacaggagattgatgtgtgagatgggaagatgccatcttcaccagggcttggccaggagaatcagtgggttgccaagatgcctggagggtcaggagaatgcagtgaggggttgagacacctgggaagcaacctagggttatccgggactaactggaacaactgttcccctgggctatgaggagtccactgcagaggaactggcctccagactcaaaacgatagtgccatttcttatacaacctacatgtcacttcttcattgcccagattctgcatattttcctagctctgttcccttttacttggaagttgtgctttccatccagtatcccccacaccagcactgaggcccacagtccgggaaacatctgggtgggctcccctgaaatgggtcccagctgggcggcaaacgtttcctgtgcctgccaacccctcccttcctgtgtccacagagagagtgtctggagaaatcaagttaatgttttcaattaatatttgggaaaaatacccgaggccagttgttttatctttgatgccagatattcttgggtttaaagcaaagtagccaggaaagacactgatgggccttttgagggtaccagagccttctgggtgccctcttgcttcagagaagactctatgagaagacttaccccagaggataaaggcacagagatcctggctccagaaaggcatgcggcacagactctgccagaatttctggattcgggtgccatactgggctccaaaatgctgtcagtgtgagaagaggagctactcctaaaaacattgagttttcttgtcaccctggcttcctgggccatgtgaggcccagggagacagccatgtgccagggcagccatctcagtggcccaggaccttcatcaggacacaaggatcaccctcatgatgatgatgatgatgatgatgaccgtggtaatgacaacagccaacactcacagatacttaacaccatcaggcgctttatgtgcaggatttcctagaaagcaagtacccttattcatacccattttacagctgaagaaatggaggttcataggggtaaagccccctgccccaaatcacacagctatggaggtcgggagccaggacctgaacagaggctctcactcccacgcctgtgctcctaaccacagcaacgaaaaaaaccccgagctgctgccctgatgtccctcctgcctcctctactgggcagcttctcttatcacctgccatggagatgccggctcacccatgcgccacagcggccggtgaggctgctctcccctccaggtgtccacagctctttaatacaccccaggaagacacatggctccttcagaccagagtacatgggacccgttcccaggaagtggccagagggagtctgggaaatgccaggatgagatgatacatgttagggacaagtggagaaatgtgaattggggttgaaattctgtaatattaaggattcatgttaatcttaggtgtgataatgacgttgtggttatgcaggaaggaaaaaaaagccctaatccttgagagatgaacaacaaaatacttgtaagtgaaatataaggcgtccgaatttgctttaaaatatagtcatgcctctcttaatgacaggatgcattctgagaaacatgtccttaggcgattgtgtcattgtgtgaacatcatagagtgaatgaacttacacaaacctagatggggcggcctactgcacacccaggctgtgtggcacagcccactgctcctggctacaaacctgtacagcctgttactgtgctgagtaccataggcaactgagataaaacggtaggtatgtgtgtatcgaaacacagaaaagatacagtaaaacgatggtattataattgtagaggtccacaggtcatatatgtggcccactgttgaccaacatgttactctgtggtgcatgattgtactccagaaaaaaaaaaaaaagaaaattttttaaataggtggaggagatagatgaagcctgatcaggaagttgatgataattgttgaagctgggggaggaatccaaagattattctccaaaccaaaccaaactaaaactctgcctccctcagacaggtcaggttccagacccggactctggaggtcctaatcctgctgccctggatccaccggtcacctcggagtcttcacagtttccctccgcaggagccagaaggagttctcaaatagtgaaatgctggtgcagggcccagtctcccagagctcctgaacctggtgcacctcccacccgcaagcccatcccaagatcccactaacaccattgcaacccagtttgaaagcaccaggcctgtgagcattctttcattattaacaattgaaaatgaccccagatatttttcagcctcctgctttgcatggcacgtctctgtgttgtctcatatgcagtcagcagtggtgtctcccttatgctgtgttcaacagctcaaacccaaaaggaaacttcacagggaaaatgaacaaggtaagtcaaaatgtaatggtcacggataatacctactctaggtatctagtcaacaaggatgcaaaaagcctgcttttcacaggttggactgtgtgaatccatctttgtataatatgtcagggatatccacagacattcttaacatcaacattaaatgtgggctgggctggcacggtggctcacggctgtaatcccagcactttaggaggctgaggtgggaggatcacttgaggccaggagttcgagaccagcctggccaatgtggtgaaaccttgtctctattaaaaatacaaaaaaattagctgggcatggtagcacacacctgtaatcccagctactcaggaggctaaggcatgaacattgcttgaacccgggaggcggaggctgcagcgagccgagatcgcaccactgcactccagagactgtctctcaaaaaaaaaaaaaaaaaaagaaagaaagaaaatgtgacttacaagctttccctcagagttgtgaaggaaagaaaaaacaatgtgaccataataaaaattacttaatatagatcaatgacctaaacttaagagtaaaaactataaaactcttagaagaaaacataggggaaaattttcatgacactggatttggcaaataatttcttggatatgacacacagcagaagaaaaaacagataagctgaacatcatcaaaattaaaaacttttgtgtatcaaaggacactactgagagagtataaagacaacccagagaatttgcaagtcatatatctgataagtgattaataaccagaacatataaagaactctgacaactcaataacaaaaacaaaacaaaacaaaacaacccaattaaaaaatgggcaaagagcttaaatagacatttatacctggtcaaggtatacaaatgcccagtaaacacgtgaaaagatgctcaatattattagccattagggaaacgtaaatcaaaaccacaagataccacttcatacccattagtatagctatgattaaaaagagggaaaatgacagcatggatgagaattcggggaagttggtgcatgactgctgggcattaaaaatggtgcagctgccacctatgttctcagtcataggtgggaattgaacagtgagaacacttggacacaggatggggaacatcacacaccaggcctgtcatggggtcgggggaggggggagggatagcattagaagatatacctaatgtaaatgacgagttgatgggtgcagcacaccaacatggcacatgtatacatatgtaacaaacctgcgtgttgtgtacatgtaccctaaaacttaaagtataattaaaaaaaaaaaaaggcgcagctgctgtggaaaacaatttggtagtttctcaaaaagtcagacacagaattactatatgatccagaaattccactcctaggtatattcccaaaagacacagatagttttataccaacgttcacagcagcactatttacaacagccaaaaggttaacaacccaaatatccatcaacagatgaataaccaattgtggtgtatacatacagtggaatattattcagccttaaatgggaatgaagttctgatacatgctactagatagacagatgaaccttgaaggtattttgctaatgagcttttgaaagaagccagacacaaaaggacagatattttatgattccttttatatgcagtatctagagtaggcaaactcatatagacagaaagtagaacgggggcggggcaaagaggggattggggaattatcgtttaatgggtatggagtttcagttggggaagatgaagaaaaaggttctgagatggatggtggtgatggctgaacaacaatgtgaatgcagttaatgccactgacctgtacttttaaaaatggttacaatagacttaggctggccgggcgtggtggcccacacctgtaatcccagcactctaagaggccgaggagggcagatcacgaggtcaggagatcgagaccatcctggctaacatggtgaaaccccgttgctaccgtcgctactaaaactacaaaaaatcggccgggcgtggtggcgggtgcctgtagtcccagctattcaggaggctgaggcaggagaatggtgtgagcctgggaggcagagcttgcagtgagcagagatcgcgccactgcactcctgcctgggcaacagagagagactccatctcaaaaaaaaaagaaaaaagaaaagacttaggcttagtggtgcctgcctgtagtcccagctacttgggaggctaaggcaggaggattgcttgagcccaagaggctgaggctgcagtgagttatgatcacaccactgcacaccagcctgggaaacagagtaagactctgtctcgaaaagaaaaagaaaaaaaaaactaaaatgtcatattttatgttatgtacattgtgccaaaattttaaaatgtgaataggataaataagcaggtcactgatgaccatcttaaggcaatgttatgcagatatctagagttaaatatttgcatgtaatttcacacagttcttcaaatgagtcccttttgaattactggggagataagtatatggagaaggcattagatgccacataaaactgaggaattaaaaaaaaaaatcttgaatggtaggaatcttggtgctagaggcatccctagaaagacactgtcagaattccgctccaagaaacaaaagacctccgggaatccactcgccctcaagacacagcatttctagattctctctgctcacatcttccccttctcctggctttccagcaccccagctgactacaactcagaagtgggaaggcacatgtgaaaaaattatgagttccagtctttaaaaattattacagttttaaataattacataaaaatatttacgtttcccgagtcaaacctaaaaaccacaaggcatgttcagaaaagcttcacttctattcctaggcatgaagccctctcccatacttgttttctttccttttctttggattttatttgggtttctccctccagtattaggttacggggcccatctccaatgcggccatctttacccacaaagcacgtggagcccgtgcagcggggttcctcttcaaagaaaactgtgatgctgtcagcaggaagtgcacaaagaaaagggatgtacacactcagcaacgcgcacttgcttcctttcactacagagcacattttactgggtaccggctctgtgctaggcaagattttttttttttctttgaggcagagtttcactctcattgcccaggctggagtgcaatggcatgatctcggctctctgcaacctcccaggttcaagcgattctcctgcctcagtcttctgagtagctgggattatatgccaccacatctgcctaatttttgtatttttagtagagatggggtttcaccgtgttggccaggctggtcttgaactcgacctcaggtgatccgcctacctcagcctcccaaagtgctgggattacaggtgtgagccaccacgcccaaccaagattttcaaaagaagtttgttttcattttttctgttttggggattattctaatgttaaatctattaaaaattaagcaaggcacaatgcaccaaagaaaattaacagcattttgttgaaagaacgaagattgggtgtccctcaaggatggctccgaggtcccctctcagaagcccttcttgatttaccccacagagttagctgtcccctcatcctaggatcctcatgcaagagaccactagcagtgaccatgggacattatgactgtttatgtgactagtgtgtctggctcccgaaactgtaagaacagtgaggccgggccgggcgtggtggctcacgcctgtaatcccagcactttaggaggccgaggtgggcggatcacgaggtcgggagattgagaccatcctggctaacacggtgaaaccccgtctctagtaaaaatacaaaaatcagccaggcgtggtggtgggtgcctgtagtcccagctgctcaggaggctgaggcaggagaatggtgtgaacctgggaggtggaggttgcagtgagctgagatcgcgccactgtactccagcctgggtgaaagagcaagactctgtctcaaaaaaaaaaaaaaaaaaaaaagagcagtgaggccagacacaatggtttctttctttctgataaataaaagcccatatttgtaaagagtccagcatatcggaagtgtcccttagatgttaggttctggccaaggacccccagtgcctagcaaagtgggcatccaataaatgtgggttgaacagacaaataaatttagaggacttcgcttacggctctggcaatcttgacctaaaaaattaatgaaatgtgtaaaaatgtactccaaaaattccagcaatatgctattggttagcttatgcctttattccccacctcattccaacaatatgaaattggtgtagttttgtttgtaaagaaatgtcaggataggcaggatgtggtggctcacgcctgtaatcccagcactttgggaggccaggagggcggatcatttgagctcaggagttcgagaccagcctggccaacatagcaaaaccctatctctacaaaaaataccagaaaaattagctgggcgtggtggtgtgtgcctgtagtcccagctacttggcaggctgaggtgggaggattgtttgagcccaggaggttgaggctaccgtgacctaggattgcaccactgcactccagcctgggtgacaaaagtgagaccctgtctcaaaaaaaagaaaaaagtccgggtgtggtggctcatgcctgtaatcccagcactttgggaggccaaggtgggcagaccacctgacgtcaggagttcgagaccagcctggccaacatggtgaaaccctgtctctactaaaaatacaaaaaaataaagttagccaggtgtgttggcatgtgcctgtaatcccagctactcgggaggctgagaggcaggagaatcacctgaatctgggaggtggaggttgcagtgagccgagatcacaccattgcactccagcctgggtgacagagtgactccatctcaaaaaaaaaaaaaaaaaaacacagaaatgtcaggatgagtaagctgagtacagagtaaaacttgacattaagaagaaaatctgccccagctgagtggccaggggaacctcagctccagctgttcattgtgttgggcagcagtggtgggaggggtgccggggtgctttgcagaaaaaagaatcgcagctgcaaatacaaattgcatattcctagacctttgaaagataacaaagacttctgccctcaactgatgatgtcctgtgttaaaatcacttggctaggtagttaaaactgtttgaaatgacctggtcactttctgatgtggacgtgcaatacacatgtaaagctgggtaccagatttgactcttgtaaacttcaaccaggtagttttgaaaacaccctagaagtgaacaaccttgaatgtcctgaagatgtgggagtgttcgacaagattcaggcagctgcagaatgaggacggttgtcagtgggtgacgtgttcaagctgctcaggcccctcaccgggatgagcagaaaggtcagcattttcttagcccagggaggcttagtactcttgaggcaaagaaatcctgcagcataagtaagatccagcgcagagaatacccgagggtgaaccgtgatgagaagtctcagagcgcactgcgtaattaccacgtgtagaaagcaaaacgttgacaagacacggccgttagcaaaaagccgaacggttactacgctcaacgagaaaaggaaactgggagggttgaaaaaaagaaacgaataattggcaaattccaagaggctctttcaggaagagacagttgggtggttttgtgaaagcagaggtgactcttggaccacaaacatgaagcccacagggagagccgggtgaaaaaggaaggacagaagctaaacagccaaagaaaacccaaagcgtacttcagacatgccaaggccaagaggctctgtatctaaaaaggagcccaagtgagtaggaccagttggaaggcacacttaagagtgtaagcaagactcacaggaacctactgtgtctcgccttggacttcaagctgatgctaagatggcgtttcacaccctgagtggggaaacgaaggaaactgacgggggtgctgaaattaaacatccctcctctggacctccaggctgcaccccaccctcggccacatcaatggcacaggacttaaaactggacgctctctatccactggtagctcatgcattccagaatcaacctacacagatcatgctcctccctcagtgcctgagagttctgcacaggacgctctcagaatctagaggctccaggctggggccaggtccaagtcccagttgacacctcagtgcctgagtgttctgcacaggacgctctcagaatctagaggctccaggctggggccaggtccaagtcccagttgacacactatctccagcccaggccagggcttccctggtaaatcaatctctgaaggcagtcatggtaccagcctcagttttatttatttatttatttatttatttatttatttatttatttatttagagaaggagtttcgctcttgttgcccaggctggagtacagtggtgtgatcgcagctcactgcaacctctgcctcttgggttcaagcgattctcctgcctcagcctcctgagtagctgagattacaggcgtgcaaccaccatgctcagctaatttttgtatcagcctcagtattattttaaaggaacttaaaatggttaaactttaaaatggggtgaaatgaggcagtccccaggatggccagacatttatggggctgtaaggttcccaatgtgatgcctgtccggggaatgactccggagagtcctgggacccaactgccacagcgtctcctatctctcctgggaaaactgggaggatggataagtgacagtggaggcagagaaacttcagtttagctgctcagcattttccctaactcactcatgataactacatacccagttccatcctaactcggaacagccagatcccactgaaaaccctgggtcactggaacaggaagacaagagccacatttgaaactgcctctgctctaggtcatcagctttctctaatttggtgtccctgccccatcagctctgtgcagaagagcacattgtggctgggggttaagaacaaataagacagtgctggctgtgagaccctggctgggttacttaacctccttgaaactgcagaacaaggatatgaaggcatgacttcactgggctactgtgagaatgatgagaataatgcattaagcccacggcagggtgcctggcacacacggagcactccggggagctattgttctcactcctcattagaagggacaaacctgagatgaagctcttatttggcaaggtctgggtgatctggtgcactcaggcctctcaatttatatgaaaagtcagaattcaattaagggaagatgacataaacccaagaaaagcctgctagagatttgcccaggaatagccctctcccctgtcacctgcctgatggggagctgctgaattttcacagcatcatcctcaaggctctcacagatcagagcagaatccctgaccccagacccggaatctctaaatttgcgtgtgacctcctctccctttgtggcacatgaagatttctagtgatctctccaggcagaatacagtattccttcctttccctcaccgccaccgccatcagacgccaattatattcaatgttttccttaaaatgcaacatgagacctatcgttgaagtcttgcaccaattttctcttcttatccccaaactcagatttgcacagcaggccgccactttatagacaaaacggtgcgtggagtttgaagcacacatatatgcctatgactctttaaaaaaaaaaaaaacgctttgaggtatgattgacatgaacaactgtacatatttaatgtatacattcaatgaatgtaaattcaaggaggcaccagacgagagttctggagctccgtgagggtagctaaggaagcaaatgggatgggctctgccaggcttaggaaggaagaggtggtgtctgagcactcacctggacttctgcaaggtcagcaaacacaggagcagtcgctgagcagcggtgcaaacacaccagctctccaacgggtgcttcactgcacttccctgcagagaccattctaaaccaaactcagcgcctgggaaggctctgcccctcaggatctgcccctcatccttgtggcctattgctgtcgacctgactggatggaggggtccctagatggctggtgtgtctgtgagggtgtttccaggggagatggcatggaggtcagtgggctgagaggggaagatctgccctcaatgtgggtgggcaccacccaacggctgggggcccagtagggacaaagcagacagaaggggaacattcagctccctcttgcttcccctcccttctggagggagacactttttctcctcctgcccttggacatcaggcttcaggtccttctgcctttggactctgcaaccccctgggggctctcagaccttcagcctcagactaggggctgcactgtcggctcccctggttctgaggcgttcagacttggactgagccacgttaccggctcctctggttctgcggcttgtaaacagcctgtcatgggactttgccttcgcaaccatgtgagtcaattcttcccaataaattctctttcacatgtatcctgttggctcagtccctctggagcacccagacaactacagcacaggaagcagttcatcacagactggggctgggggagaggcaggaataaaggctgcggactgtcaaagatacccagagaggggctaggaagtcgggagggtgggaggtgcagcagatgcagccaccgggcaccaaactgcagcaaggtctctgaccccagcttcttgcacctcaccacgggatgcagcaattccgctcctcgatacagacccagaggccatgaaagctgggacttgaacaggtatttgcatactcatgttcctaacagcactatttacaatacccaagaggtagaaaggaccaaaatatccatcaacagatgaatggataagcagtttgtgactatccagacaagagaagatcacttagccttaaaaaaggtagggtggctgggtgtggtggttcactcctgtaatcccagcactttgggaggccgaggcgggcggatcacctgaggtcaggagtttgagaccagcctggccaaaatggtgaaaccctgtctctactaaaaatacaaaaaagttagctgggtgtggtggtgggcgcctgtactcaggaggctgaggcagaagaatcgcttgaacctgggaggcagaggttgcagtaagccgagatcacacaactgcactctagcctgggcaacaagagtgaaattccatctcaaaaaaaacaaaaaacaaaaaacaaaaaatgagagagagagaaaaggaaggggattctcacacatgctactccatggagaaactttgaggatattaagctaagtgaaataagccacacaaaaaggataaataccgtagaattccactgagaagaggtatctagaatggacagatttacagaggcagaagtagaatagaggttaccggtgctgaagggaggacgcgtgggaagttgcgtttaatgggtacagagtttcagttgcggaagatgaaaatgttctggagaaggatggtggtgatggctgcacaatactgtgactgtacttaatgccactgagctgtacacataaaagtggtttaaacttgggcaacatagtgaaaaaaaaaaatctttaaaaaaattagccagatgtggtggtgtgcacctgaagtcccagctactagggaggctgaggccggagaactgcttcggcctgggagtttgagactgcagtgagctatcactgtgccaccgtactccagcctgggtgacacagcgagaccctgtctcaaaagaaaaaaagatttaaatggtaaattttatgttatgtatgttttaccacagtaaaaaatgcatataaaaaactgatagaactggatacctaaaaagagtgaattttactgcatgtaaattatacctcgaggagcttgactttaaaacaacctctatcttcagggaaaagttataattcattctttctttattctattccactaggcttgtctgcttgaggggagtggggagagacagcgagagacaaagaaagctaagagagaagagagaggagagagagagaaaaagaggaaagaaggagaagagagaagagagaggaggggggaaagagagaggagacacggaggagaggagacaaagagataggaggagaagagagagaaagggaaagagagagaagagaacgaggaggggggagattactaaaggacagtgtgttgttcccagaactcaagacctgcccctcatcctcgtggccatctcctctcttctccagcctctcctaattacacggtctaagctggtgaccccaagaggacgacagttctccttctgtcctccattacgaactgcctgagaaggacagcccctcccacgtgagctcactcccaggacaattagccttgacttggtggcagtcagcagcacagacatgactttctgcagaggaagggaactgtgcacggtggagccacccactgcctacagacaacggctaaaccctcagaactacatttaaggatcctcaaaatctggcccaaaagcttctgtgtaaaccaaggatgaaaactgaaatgtgggtgggtcataacagggtgtggcctgggacaggagcacaagcagagagcggaccacagagcctggggcaagggagattccacgtcccctcgaaaggtgttctggtgaaaatgaaacatcttgatttttttttcaattttttaattcatttatattttaattaattaattattttgagagagagtctcactctgtcacccaggctggagtgcagtggtgccatcttggctcatagcaacctccgcctcccgggttcaagcaattctcctgcctcagcctccggagtagctgggattacaggcacctgccaccacgtccagctcatttttgtatttttagtggagacggggtttcaccatgttggccaggctggtcttgaactcctgacctcaggtgatccacctgcctcggccccccaaagtactgggattacaggcatgagccaccacaccaggccaattattcaatttttaaatattcaattcaattaatacaaatcgaatttaatattctattcaaataattttgaattgaagaagcattgaaattgtattcaatattactagagaaaagtgctcaatattattatttttgaataaaaatacttgaatcagtaaaaataactattatttggccatgttatgaactgtattgtgtccccccaaaatttatatgctgaagtcttaatccccagtacctctgtttaaagagggagttcaggtcaaaggagggagtatgggcagcgcctaccccaacgggaccagtgtcctcctgagaagagaatgttaggactcagacacacacagagggaaggccgtgtgaggacgcagggaaggcagccgtctacgagccaggagagaggcctcaaaatgaaaccaaccctgccaacaccttgatcctggacttccagccttgagactatgagacaatacatttctgctgtttgagctgtgcagtctgtggtatttgttatggcagctcaagcaaagaaatccaggccatacaaaggaatgaagcgctgcagtgatccatgccacaacgcaaatgcacctcgaggatgttacacgaagtgaaggaggccaggcaagaaggccacatctcgtatgactccacgtacacgaaatgtccagaacaggccagtgtccatcacctgttcccatagaggccccacctcacaacagaggctcctgagaggtgtctggcctgggcactgggagcacagatccagagccaggctctctgtagtagaatgccagctccatagtttctaatcccaggacgctggttaagtggctgaacttctctgtgcctcagttccttgtccgtgaaatgcgggtaatgacagcacttacctcacagggtatggaaaggactaaatgacttcattctagaaagtgcctggcccttggtaagctgctcttaagtgtgatctgttaaggaaagctttagttgttggttgactgttggtctctcaccctttaaatagaaattccttgagcacagggactctgactagctattcctgttctccagcatcaggcactgaatgagtgagattctggtcctcgctgtgagggaaaggaggtgatctccaggcaccctcagctcccatcttctgtggatctgggagcccaggacacatagaaatctcttccccaggccatacaccattccttatctatctgtgggcccagcccacactgaacctcagtccacactgaaccctgctccacgaggcacggagttcaccaggcctccaacttgccttgcaaaggactcatgctttgtagtggcctcagggctattccaatgtaggaaacaggtagggtcaagggtgccgctggcaagtaggacctaccctatggtgccttgcaggcctccatccacgtgggccacccagcctcattcacagagttctccaggtcagccacctgccctactctgcacatgacactcacaccagcattaactcatttttgcaggagtaacctctgaagaccagccctcaagtttcaaggccctgccagccgctctggccatctccacacctccaaggttccagagaggaaagttcaaggaaagagttttctctgttggcccattcaggcccgggtaggccagaggtggccagcagacctgacatctggaaatacagtggctgcacgcaaaagattacaggcctttccaaagcaaagctgccgaacccctcggggaccatcttcctgggctgatgcactgaggacccctggcccttggcagggtcttctgcaggggaaactaaatcccaccagcaaatgtcaatgcatgcaatcgtgacaggccacaagtcactgccaatccaaaacctactctttcacaaatcccagaacagacttttattaggtatgagccactagcgtgaatgtagctgccactacttaagaaattggaatttaagcccctctctcctgtatgtgggaacatgaaggtttgttttggcattcagatctgtttccaatccaactgttagaaaaatcacattaggcaggggtgaacattatacgggagtgtggatcacatcttgttttgcaataccccacagtgtctcacttatatcaagaggaggctgtgaaaatcttacaacattcctctgaaaaatgagctttcattctccgacaaggacatgtgagattttggttcaggagacacttggagagacgaccaagccagacagcacacagcccttcctaggagagatgggaaggtgagcagagactggcccaatagcagcaggtcacatgccatgaacgtgatgtgttgggaggatgggggttgctccccacagggacacctctgcatcaaaagtgctgggtaatttgggaggccgaggcaggcggatcacctgaggtcaggagttcgagaccagcctggccaacatggtgaaaccctgtctttactaaaaatgcaaagtagcctggcgtggtggcacgtgcctgtaatcccagctacctgggaggctgaggcagaagaatcactggaacccgggaggtggaggctgcactgagccgagattgcaccattgcactccagcctgggcgacatccatctcaaacaaaagagtgctgggtgagaggtgacttgctgcctggttccccaaacaagaaggctctgctccccggtacatccctaacaccttcaaacagcccctttccacctcatccagtatttagcagccctcctctgttagtcacagcagttgccctcctgagccaggctttggaagacccctgacatcgaggtgggccacagggaacaatgacattttcccacctgcaccagcacacgcacatctgcctctgggtcccggaacgcccagagacacatgtggatggcatcaaatggtaggtgagggtacagagttttcagccccaataatgacatgcccatagtcagatgtgggtctcgcaaagctggggtcaccagagacactgccagtgtctgggaccagcctcctcctgggcctgcaggttgaggtttgcccaggaccctggcactcagtctccatgtgggtagttgttagacatcagcctgccgccaggcatgaagctgtgctccctgcactgcaggctccctgcaccccgcccatcagcagcagggctcccggtgtggctgagatgtcagaggcaccctctgcacagcctgagatgggactagtgaggccatgatgaactgtaattcagagaggatgaatttgggttacagaggttaatattctgctcatggtgagaatcataagtgatcaaagtcaagggcatagaggatggtctgacatagccccagacctgaggccaatcgtgaacttcagtgagggaaagacccagaggcactactggaatgaatgaattaatgaatgaatgtaagaacatttaaacttaacagcccgaatcctctggagagatgctagatgccactctgagatgggggagaagggtggggagttgactgtagggcaccaatgcatggaaaacagactgggaaggaatttgctagcctcagattatgagggaggctagaaccatagggatggaagaagctggtcaaggagagtgggaagggggaggaaggagagagggcacggggaccaagaaacagcaagctgcaatatgaaaatagtgggggctgagctagagaggctcaggagacagggtaagtaaaagatgggaaggaatccccatagcattgacaatggttaacatctgtgaatgctttctagccgttccaagcaccttccctatattgagtcttttagtcctcatgacaactttgggcaatagacactattacttttcctatttttcagatgagaaaactacagcccagagagggaagtaactttgctgaaataagtaagtctatggtaagtggcagagagatacgaaccaggcagtcgagctccaaacccatgttcttaagtgcttcatttcacccctttggtcagaagggatagtcaataactgaatcaacgcatgggacagggtaggaggcaggattctcactgaacgagcttgtccagggtacctgagtgctgccatccataatatgagggattaaaataccgaccccctttcacctgctgggaacagaatgtgtgttagtatactctcaactctctggggaaatgtcttagtatatacacggtttagtttttaatcttaaacaagatgaggccccgaagccactcactctgcccctgctccacaatgaagggaaagggaggtaaatggagactccagttcagaacagtctggacacagctgcccatgagaaagaagggcagagaaaggaatgccttcttgttctacgggaagccacgctcacttactcatgtcttagggatgaagcttcagaagttgtagccggactaatttgcataaatatttcagattaatcttttttgatattttaagaatacatgggaagaaaatgtaaatgtaaaatatttataaactttaacttattttacttataacttgcctcttcccataaaagagctatttaggtagatatgctataaatgttactatagacatacaagtagaaatcatgactatgacaaagaggaggaagcccattctaaggactaaacaagccaatatgatttggcatctgtttttaatcaatgactgcttcctggcagcttgggcaaaaagggaaataagatgtattacaaagctcttgccatagacagaggaagtaggctaatccctctggcaaaacaaagcttttcctggcactcaattctgaaagaaatttctcatgtgaaatcttacataaaaaacacagtgactaatagccttctgaaacatgggagcgtgagacctgatttttaaggcccagtggcttcattgggcctctctgagaggatccttgtcctcctgagacacattgtcttaagctcctagaattccatttggtttcctggctgaggactgaaaaatctcatctcagaactctacgtctggtataatggctgtcacggtgttctgtggataggaaacactctttgagtcagtactgctaccaaaagaagcaaatggtttgtcaaggatcccacccactacatagaaaacaaaaccatgagctgtgcagtgccagagcagcaaggaacctgaggagccacgcggtcctaatggcaacagaggcatcgctatcaggacacagagcctcaagtcaacagcaaaggaaactgggctggaatgtccagctttgctgcatcaagatcctcagaaatggctcatatagttccacagcagtgtatccccagggctgctggccgttggagaagcaaatctgacctggaggaaaaattctccaatttagagtaaggagtcccacaaatgatggtcaagcaatgagctcataatcaaagattaacgtggaagaaggcaaggccctgtggatgagagtcaggagaaacaagaagcaacaaagatgtctctcctccataccgaaatgaccagaaatggaattacagaacagctacacataaaatgtttacagaaacatgtaatcacaaagataaggaaacaagaagagactacgaggactgagtaagaagttttgggggaaatgtagcatctatacacaaaaagtataatggttgaaataaaaacatttaatgggtgagttaaataggagattagataaagctgaagaattaatgaactggaacatatatcaaatatattaccaagaatgcaattttattaagacataatgtggaaaataaaaatgacatatgaagaacagaatgagtcccaaaaagaaagaataaaaaaattggagaaaaggcatatttaaaagagaatatatataaatttcctatgaccaagttgaagaaaaagaataaattcacaactctaggaagcaaaacatctgaaacaggataaataaaaagaaatcaacacctatgtacaacaacagtacccaacatcaagacaaagaaaagatcttaaaagtatttatagactctgggtgcggtggctcacaccaataatcccagcagtttgggaggccaaggtgagagatcatttgagcttaggagttcgagaccagcctggcaacatggcgagaccctgtctttatttaaatatatatatatatatatatatatatatatatatatatatatatatatatataaaagaacttaaaaataaaaaaataaaaataaaaaattaaagaaacacattttacctttaaaggcatgactattagaatgacaacagatttatcaacacaaatactagaagccagcaaatggtagaatatcctccgagtgttgaaaaaaaagtatctgacagcctaaaattatgtgtccagtaaaactaacaattaggctttgtgcatcttactatttattaagtttacttcaataaaaaatgagaaaaatagtagagtgtgtgtattacaactgatagaaacaaatgaaaagaagggaatataaacacaaaataagatcattataaaggtgagaactagataagcctagaaaaagtgagacaattggaaatatttttaaaatatttttaagtccgaataaatcaataaatactacatatctaagtagagtaaaattattaggtaaaagaaacagattgacaattggatgattaaaaaatccaactatgtactgtttacaggagacatgcctaacgcataaaggacatagacatattaaaagcaaaaagtggctgggcactgtggctcacacctgtaattccagcactttgggaggctgaggcgagtggatcacctgaggtcaggagttcaagaccatcctggccaacggtgaaaccccatctcttctaaaaaaaaaaaaaaattaatcagacatggtggtccttgcctgtaatcccagctactcaggaggatgaggcaggagaattgtttgaacctgggaggcggaggttgcagtgagctgagatcatgccactgcactccagcctcagtgacagagtgagattccatctcaaaaatataaataaataaaataaaagcaaaaagctttaaaaacacatctgactaatatcagccaaaaaaggaaagaaaacagaaaaaacacccacacataaaaccccacaaaaatatcaacactctcagagagattttttaaacgcgcctatgaaaccggacatggtgctattttaaaaattagaggatgaaagagatctcgctgcctgaaaaggaggagaagggagggataattttacagcggaaaaatcagacacacgttgccccaccagatgactcaagctcaacatcagcagcgatgtcacgctgatcttacgtgccttgatacactgtgatgaggatacttcacctctgtgaccctcctcctacatctccatcagcccagttcaaccatgagaaaaacatcaaacaaacccaagttcaggaacattctacaaaatacctgaccagtactcctcaaaactgtcaaggtcatcaaaaacaaagtctgagaatttatcacagctaagaggaacccaggaagatatgaccacgactgtaacgtggcatcacacaaactgtcatgtcagtctcttaaaaagttaatcgtatacctaataaatgatcaaccatttgactccaaggaaatgaaagcatgtgttcatacagagactggtccaagaatgttcctagcagccttctttgtaatagataaaaaactggcaacaatccacatatctatcaattagcaaaaggataaacaaattgtgttagagacatgcaatagaatagtacttgacaataaaaaagaacaaattatttataaatgctacaccatgggtgaatcttgatataattacgctgaatgaaagaaaccatatcaagcaaaatggtccatactgtatgattacagttacatagacttcttggaagcccataataagttatagtaacagaaagttggtaagtggtcacctgggaatggagagagggtggggaggtacagggaggaaggattacaaagaggcaggaggcagagcttactctgtggagaagcaaaaaataaaacgaagaggcaggaaggaacttttagggtgatgtatatgtttattttctttactgtagtgatggtttcatgagtgtatgtatacatatatgtcaaacttaccaaactgtacactttaaatgttaattttccattatatttcaatgagactgtttaaaaatatgaaattgaggctgagtgtggtagcttgggcctataatctcaacactttgggaagccgaggcgggagggtcacttaaggccaggagttggagaccagcttaggcaacaaagcaagaccccatctctacaaaaaaaaaaaaaaaaaaaaaatggttttaattagccgagtactgtggtgcctgcctctagtcccaactacttgagaggctgaggtgggagaatcacttgagcccaggagttcgaggtagtagtgagccatgattgcaccactgtactctaggctgggaggaagagcaagaacctgtctcaaaaaacaaaccaaaacaaaaaacaacaaaacccagaaaaagaaaaaaaaaaaaaagaaattggatccctaccccataacatacaccaaaatcaattccaggtagataaacaacttaaatgtgaaaagcaaaaacattaaaatttttagaagaaattatgagagattctctctctaaacttggagtaagaaaatgttccttaaacaagaaacaaaaagcactaaccctaaaatgaaaaaacaaacaaaagacagataagtgcaactagattaaaatcaagaacatctgtcaaaacagatgtcaaaaatacaatgaagaaagtcacaaactgcgaaatattttcaataggtgtaacatgacttctcgactaaggattagtattcacaatacataaagaactcttacaagtcaatagggcccagtttctaggtagatggagtagatatagttttccctgtttctcccactatgcacaaataaaagcccagggcattatctataaaatatgcatataaaaatgtaagaagactcttaccatgaagagaagacaggccaactagggaccttgggacccaaggaatgatacagcagtcagttttctggcttttctttttacctcatatttcccagacttggagctgaggaaatgagtaacctggaaacactaaaaggcacagaccaaaaaaagccccaacaggccgggcacagtggctcacgcctgtaatcccagcactttgggaggcctgggtgggtgaatcacctgaggtcaggagttcgagaccagcctggtcaacatgatgaaatgtctctactaaaaatacaaaaaattagccaggcatggtggcgggcgtctgcagtcccagctactcgggaggctgaggcagaagaatcgcttagagcccgggaggttgcagtgagccagattgtgccactgcactccagcctgggtgacagagaaaggctctgtctcaaaaaaaaaaaaaaagtcccagcaaaagcctgctctttctagccaaaggaccagggaaggggcatcctggtatgatagagggcattaggcaactgccactctagtccctcaagaggctgtgctgaggtacgccaacacccctgctggggtagcctcagacaaggttaagtagggagctgggccttcatgtgagcaggccagtgacaaggccccacctggggcaccactggagaccaggaactcccacccagccagcccagcactaatcagggccctgccttgggtgtcagcagaggccttgcggggagcctggacttccacctccacccgcagtgggcggcacccacccttcccctacagggccgtgtcagggaaggacggctaaaacagaagggcactaagaaggtgtcaataggacaaagaccgacaatctgatagggaataggcaaaatacaagcatagaaaagaagataagaatcacgctaccttcttaagctgcttccatgatcaatgatctgtacttaaaatcattttcacatatggtaagtagcaaacaagaggtggtattctttcttgagatggagtctcgctctgtcgcccaggctggagtgcagtggcgtgatctcggcccactgcaagctctgcctcccaggttcacgccattctcctgcctcagcctccctagcagctgggactacaggcgcccgccaccacgcccggctaattttttgtatttttagtagagacggggtttcaccatgttagccaggatggtctcgatcttctgaccttgtgatctgcccgcctcggcctcccaaagtgctgggattacaggcgtgagccactgcgcccagccaacaagagttggtattcttatttctgcttcacaggatgtgacacacatacactctaaacacatggaaagatcctcagtgtccttagtaatcagagaaactcttgtggtttggattaaccacaaagagacaataattcataggccatttacacactagattgtcatgaaagtaagaagttcatccacatcaagtgctggagaggatgtggagcaacaggaagtcttgttcactgcaaatgaacgttaggatgtttggaaaacattttggaatcatattgaaaagctgaacattcacatagttgacggtccagcaacgccacttctgggcatgaaccctaaggaaactctcacacacgccagaagacgtgcacagagacgttcccggcagcactgtttactgtaacaaaaaactggaaatacccgaagtccaccatcacgcccacacgcccctgaaccgcagcacacgctgcacgcagtgtgacagcacagcaccaggactgaatgagtgacagctcccgaccaccagcagcacgggccaaccccacacacgatgccagtcacagacgagcacagtcaggaacgttagaaaaacccagaacaatgagctttctattttataaaaaggagagaaagtggaggaaagataaattctttaaaaacgtcaatgctggccagacacagtggctcacgcctgtaatcccagcactttgggaggccgaggcgggtggatcacctgaggtcagagttcaagaccatcctggccaacatggtgaaactccacgtctgctaaaaatacaagaattagccaagcgtggtggctgagataagagaatcacttgaacttgggaggtggaggttaaagtgagccgagattgcaccactgcactccagcctgggcaacgaacagactctgtctccaaaaaaaaacaaaagtcaatgatgtaaaagacaaagacagtctgtgaaaatgctcctacagatttaggcagtgctgaggacatatcactggctcctgtattgcaggcagaaaatgctacaaaacggcataattaggtcaattcactaaagttagtgaccttaatgtggttgtgtaagagaatattcctgtcatcaccctgaagtatttaggggtgaggggctgcacataaggtgaccacatcaaatggttctgatacaattatgtgcacgtatgtaaacgcatgtgtgtgcctgtgtgtgcgaaaagggagggagggagagagagataaataattttaagaatggggtaaaatttaaaaaggtgaacttgggtataggatatatgggtgttctttgtacttttttaaacctttgcaacttttctgcaaattctgtgaatttgaaattattttaaataaaacattaaaaaaaaagaaggggaaggggcatacaaattaaaactccaggtaaggattccccaaggcggagcgggcagagccctgggctaggtccggaggggagggtgcgggcttccctgctgtgtgtctctccttgggaaacaggtcctcgggtgttcatgatcacattttgctttgtgacttggacactatcttttgtatgttatcaagtaatatgctgcaaaagataaaaaagagttcacctcatctcaggaaagacattcctggctgtaccaggtggagctctgaattgctgtggcctgagttcctgtcatcttttcgtctgaggcataaaatgagtcacatatcttctttgtttttcatcccccacaatttcccatacaatcgcacccccgacccccgatttccgatattctcaggcggggacaggaggcactgaagtgtaagagaaactgctaagttgggcagacagaccagttaactgctctgagttttaaaatgccaattaaaaaaaaacctgccttcccttggtgagagggtcagctgctggctctgggactcaggaggcctggcctgggggtcaagaggctgcccatggtggggcggaccctgggagcagcagcagatgaaaacgagaggatggggacaggcaacaggtgggaccctcgaggtccctgcacaggaaagggctgcgtcctagccagagagcaaggtttgaggtgtgggctcaggcacaggctgggctctcagtgggtgatggtgacagctgctgcgatgtggactggaagtgggtgtggggaaaggggaggtgcagcccccatctgcaggtcctagagcaaaggtcagaagctcagaagctggtccccgctgagagaagtcaggcatgtgtgaggcgaagtgcgctggccaacagtgtgtgtgccttgacatgcactgcgtaggtgagagaatctggcaaacaagggggtggccagcactgctccagccacctgcagccaagtaggaatggccccgtgttggcagatgttctgattctccaagggaaaccagaaatccgagttttacatgagatctgtgaggattctgaagtgttggctcaaagcaccttaaaatgagaggcaggcctgacaactacaagatggccccaatagggacctccttactgagcaccatcagcttcctggggtggccataacgaagttccacagaccggtttaaagcaacacatgttgactgtctggtacttctggaggctggaagtgcaggatcaaggcatcagaggggttaattcctcctcatggctgagggaggggtctggtccatgcctggcttctggtggtgtgctcgaaatcgtggcgttccttgacttgtaagtggcttaccccatctccaccttcatcttcactcggtattctcccagggtgtgtgtgtgtctaaatttccctttttctttttttttttgagacagagtcttgctctgtcatccaggctagagtgcagtggcacgatctcagctcacggcaacctccacctcccgggttcaagcgattctcctgcctcagccttctgagtacctgggattacaggcgcacaccatcatgcccagctaatttctttatattttttggtagacggggtttcatcatgttggccaggctggtcttaaactcctgacctcaggtgatccgcccacctcagcctcccaaagtgctgggattacagatgtgagccaccatgcccctgcctaaatttccctctttcatgaggccacggttatattggattagggcacgtgttaatcacctcatgttaacttgatcatgtgcaaaggctctatttccaaataaggtcacatttgcaggtaccagaagttaggacttcagcatctttttgaaggggcacaattcaacccataacacgaaggtaatctgcagacaaacaaagcagtgatggaggcccaggaggactatggtggggacttgggaggcatccagaatgggcccagagccacggacagggtgtccaatcattggaactggacaaagtgaaggacctgtgccagacagagcctgtcagtgagggtgcaaacaccttctgagacagcagaccccaaggagaagacacaaagggccaggacccacggtgagtctaagcagacctacaggtaaaccagccccccaagtccatggctgttggggccttcagactataaatgaggtttcccataggacatacccactctgcactgcagcagagccggtgaagcacgtggtaggccgggtctgctgaaggccgggaggaggagggttgaacaaacagagaaaaacaaaaaacagcacaggcctgctctgggccggcgccgaatgatcatgtcactccttccccctgggctgcagcctgtcctggcagtcaggtctcagcctggaggatattttccagtcctgggcgagggtggtttccggcctaccaaatgactgacagttctttaggcctcaggcttcctgggtgccccacaccactgcagcctgcacaccagggcagcagctggtgcgtgcactccagggacttgatcagaaaccaggggaccccagggtacatctgcaggctggcttcaggggcagcagaagccatggatatagcctattcctccccatccaaccaaggaacatccccctgggcaggcatgagcaaagagcaatgcctgggccaacaaggaactccgtgggaggtgggaagtagggtctggatgggagcaagaggcctggtgtggggctgtggtcactcctgaccatattaacgcaattatgtgtggaataaagcaaggatttaacactgctgtttctaattctcactaatgacgacaagattttacttaatttatacttcttccctcacaatgaaaaccttctcaaagatattaatacaattacttatggtcacatatgtaaatttgtatatatcatagtttcaaaacaataccatttttattaccaacaatgagactactgaacacagtttaggttttatttgtggttctttttgtctctttgtcccacttggaatgcacgaattactgcgttcaaagtcacttgaaacaattctctgtgaggttaagccatcaattttgtatacaggaccgtttgttttcaatattaagagatgatttttattcgttttagtttaattttgttttctagttaaaaaacacttgcagcgttgcaaagccagcttataaaacagggtacatttctgtttgtagccttgtggtttattcttccattgtctccttttcaaaataaaagcaaatatgtagacacactcctatttcctcctttttcttatataaaaggcagcatattctctacacagttctgcacctgggctcctccagtcggcaatatcctgacagtaactttgtggtgatagtagagtccctcctcattgcctcttacagccccacacaacaccacagagtgggcggacactgtccagccagtcccttggatggatccttgagaaacttccgatctttagctttacaaagagtgctgcaaggtacagtcctgttcacgtgtaagttcatgcttttgggaagactccattttgaatcctccccctcactgtgaaaccgttagctggccacttcccgtgcaaagcctcaggtccctgctctgtaagacgctgataataatagtttctagctcacagctcaaaagggcctggtgcatggtcgacagtcaataaatgtttgctgttttctttcatctgagaatcttgattcctcattagtttagaattctaggttgatagttcttttctctcagcgtttgaaaacttcttatgccacttcctctggcctccatagttcctgaggagcgatctgctgtcattgacattgctgtctccccataagtaaagtgttgcttctccctggctgctttcaagtttgtttctttgtcatcagatttcggaaagtggatttgtgttgatgtggatttctttttgtttatcgtattttggatttgctcagcttcttgagaactgtgggtttgtgttttttgccaagtttggaacatttcaactattatttcttcaattcttgtcagctcatccccttcacctctccttctagcattctgatgacacaaatgttagatcgtctatgatagtcccatgggtctctgaggctccgttctctctttttattttttcttcttcttcttcttcttcttcctttggtctattttctctctgttgttcagattgggaaatttctgttatatcctatcttccagtttactgattcttttctctgtcatctctgtcctgctgttgataccatcttttgagtttttaattttggtttttgcatttttcagttctaaagccctcattttgtttgtatcttttccatttctgtattaagactctattcttaatttctcatttgttccaaacacatctgtaattgctcactgaagcatttttataatggctgttttacagtcctttccagataattccaacatctctgccatctcagtgttggtgtgtgctgtttttcttttaatccaaggtgaaattttcctggttcttgttatgacaagtagttgttcattgaaacttagacattttgagtattataaaatattcagagtctggatcttgtttaatctatcttagccagctcccatgacaccactctggcaggaaaagatggggggtgccactgtgttgctgtcacgtggggtggacaccaggttccccacttggtctttgttgatatccaaagaagaaagaggttctttggtactgctgtggggagttcccgggagttctatctcctcactactgataccatcgtggccgggagaggccactccaccaacaccatggagaagggctggtatttggttagggcagagcagttcttacctaaacaagtgcatctggcgaggctagccctctcccgatcctttggctagagagcaggcttttgttgtgaggtcaccactgtgtcattccttgtgtcccagggtccctagctgcctgccttcttctccccatcataacagtcttcttatgtttgttttatatataatgtccagggctttcagttgcacttaggaggaacagagaaaatatttctcctctttttccaggactggaagttacttgaagcctttaaaaatatgtttcagatgccaaagtgaaacaaaaataacacaaggtcaagtacctttccctctctgggattcagtttccccatctttaaaaaattggtctagatcccagcttctccatgattggtttacagtagcccctgagggcttgtcagaaatgcagactctcaggcacctcccacccccgcccaccccaccggcatcggacctccggaatcagaacctgcattcttttttttttgtttttctcgagacagagtctcactctgttgcccaggctggagtgcagtgacgcaatctcagctcactgcaacctctgcctcctaggttcaagcaattctctgcctcagcctccctagtagctgggactacaagcgcccaccaccatgcccggctaatttttttgtatttttagtagagacagggtttcaccatcttggccgggctggttttgtactcctgaccttgtgatccatccgcctcggcctcccaaagtgctgggattacaggcgtgagccaccgtgcccggccagaacctgcattctaacaagaccccagctgagatctggcacattgaaattgaaaaacaaagctcctggtgacctctaaggccacctccagctctgaccttaatgatcgtgggctttcccacctccgcaccactgccaaaacacactgaccttcccgctgtggccacacggcactaaccagcatctaagcacagcaccatcccaccaccgccccgccccaagtgtgaagcttcctccgaccacccaacctggagggagcctctgggccccttaaacaactgtacactggatcattagccattaatcatgtgccgtccagggacagcttgtctgctttctcttcagctactatttaaaccataaatcatgtgttattattaagtttcatatctcctctgaaacccaggatgtgacaactcctgtaaagctcacggggggctgagatcaacatttccgtccttagtgctcaccatctggtcctgcacgtaggaagtacgcaaagccttcaccatttacaccaagaaagtgctctgcacacagcttccttgtgtctctacagttaatcatgagaaaatgctatgatttatgatcttcaaaaggataagtgaatctattattttctgttaccttttaaaagaaaacatttttcttcttaatcaatacccagtgctggagagattgccctgaaactggcactcacacgctgcagttaagttgacagaattagaacacacattggcgcctgggcatggtggctcacgcctgtaatccctgcactttgggaggccgaggcgggcggatcacttgaggtcaggagttccggaccagcctggccaacatggtgaaaccctgtctctactaaaaatacaaaaactagccaggtgtggtggtgcacacctgtaaccccagctactcaggaggttgaggcatgagaatcacctgaaccaggaggcggaggttgcagtgagctgagatcgtgccattgtgctccagcctgggcaacagaatgagactctgtctcaagctttaggagatatacctaatgctaaatgacgagttaatgggtgcagcacaccagcatggcacatgtatacgtatgtaactaacctgcacattgtgtacatgtaccctaaaacttaaagtacaataataataaaataaaaaataaaaataaaaaataaaaaaaagagaaaagaaaataaaacacattggcaatgcatcagatgggacaaagatgcctccaggaagcccactcctgaaactttgtaacttaattaaagaaaggtagaagtttattcatatgaagagtcatatctgtacaagcaaaaacctggatataatgtaaatgccacatgctgaagcgtggcacatccatttgacggactcccacggagccatgtgaagtcattagaaaggctgtgttcaaatagaggaaaatgcttatttcaccctaggtaagaaaatcaggctatagaataaatatatgctaggattaaaactcatataggcaaacaagagctaaaaaggaaggaactagaaattatattttattaaaattattattgtaacgtgggagactgggttgaatttcctgttcttgtttttttcccccaactttttcattttgctaaattttcatcaaatttttaaaaacgttctttagtgacaccaaaagaagattcaaagatcaccgtgggacattcactgaggaacagatcaaagcccattttctttgcaggttcattcataattccagtatatgggatctgacagttctgtgacatttgaattaagagcccaggtctcaacattgagaagttctcagcagctacaggtcaaaggaggtctccaggctggaaactactcctttgaaagagaagaccttcattcttcacctccggctgtgagttgtcattccttctttccccaatccctgctaagataagactctgcagaatgcaatgggatgcatgcttgttaaaagaaggaaaaacctttcaaaatacccttactctgctttccacagcactttgctcatagggaatctctagttcaatcccagttcccggagtaagccctggaggaggttaaactctggaaggaaggcatgggctcaggctcactttactggtgaccatgggtcccctgagacacagtgacctgtagtggacagctgccagtcctcccaccaaactgcacaggacccccaagcagctcctgagcctcctccctgagaccattcatccatctgtaaactgaggacattgatgctttccccacaagttaaatgaggtggtgattttcaacatccgggaacactgcagtgattaatatgtgttagcatctcagataccacctaccaatttggcaaaaaaaaaattttaattggtaccactcattgccagatgaagatgggcactcttgcacattcctattgggagtagagatttcgtaactatctttttggacggccatttggaaatactaagtgtaactgaagcttcagaaacctgagtgtcatttgacccaacaatttcctttctgggcatatgttatacggaaatgggatatatgaacaaatgtgtatgaacatggctcttcactatagtaattatctgtaagcagaaaactggaaacagcctaagcgtccacctgtagaagactggttaaacgcattttggcacactctttcaatggtctcttagcattagtggtattgtagaattgtaattgatcacataaaatatggtcatggaacgttgggatatcttgtgcaataatgtttactgtgtaactctgttttgtgagaactttatctatacattgagacaaagatataaatgtaccatatatctgtggtatccaatttgagaaagagtgaatcatttatggactttcctgaaccagatatatcccgggtgtccaccctgtggcaggtgcagatgtgagttaacatcgtccctgtccagcaagggagagagacagatacagagtgtgccagggagaaaggggcaacagaaaggtgtcaggtgtgccactgtgtgccaggatgtcagcagccctgctcagattctaaagtgaatcttgaaggtgccctgggcggcaccctctcactgtgtcccagctcagagagaggacagagctttgcatgaggctggataggtgcagaagagaatgacttccattctgccgtaatctgcaactgcaaaaagagacattctcacgcccccttccacgcagccccaagcaggcttcgtcaggacaacagagcactcactgagtacccgtgacccaatctgacaggactgacatccactccatgcctattctgctcctgccacaagcacatgcatcttttcatccacacctcccattttccaggtcagggaagtacccagggtcatgcagctagtaagaggcagagctgggatttgaatctagaggtgtgtgcccaccactccacactcacaggcattaacccgtgcccagtggcaaagggagcttgagaaagagaaggccatattccaggggctcaagctgcagggaacagcatgcatgagagagcagatggagaggaggaaggctggatgttcctgagcacctgaccacctcattccagagggcgcagacctgggacgagatgagcttcagctgggccctggaggaaatgatggccacagaggtggtggcgataatagctaacatgtgttgaggctttactgcactaccatgcactgtgccgagtgctgccccttcttaactcacttacatcccccctgcaacctacgaggtgtgtacgtttagggactcagtttacaaatgatgacactgaggcacagagcttaagtagctagcccaagaccacacagctggaaagcagcagagaggatctgaacccagccccacttttttagtggcttaaaacaacacagatgtattatcttagagttctgtaggtcagaagtccagtacaggtctcaccaggctaaaatcaaggtgtaggcaggctatgtttcttcctggaggctcagggagtatctctttcctgctcatctgggtggttagcaaaagtcagttcctgtgggtgtaggactgaggtccccacgtttttcctgctgtaattgagggtggatcccagctcctagagaccactgcaaaagtcggttcctatgggtgtaggactaaggtccccatgtttgtgctgcagtaattgagggtggatcccagctcctagaggccactgcttaaggcccctccctccatcttcacggtcagcacaggcaggtggagtccttctcagggtgtgtctcctgcctaactttttccatcatcttctgcttttttaaaaaattattttttttaattgcagtaacatatatgtaagattaaaattttgccatcttacccatttataattgtccgggtcaatggcattaagcacattcacgttgttttgccaccatcaccaccatccatccatccacccacagaacttcttcatgttgcaaaactgaaaccttgtccccattaagcagtaactccccactttctcctcccccagcccctggcacccaccattccactttctgtcttgatgaatttgatggctctgggtacttcatataaatggactcaggctgtatttgtccttctgcgtctggcttatttcactcagcatgatgtcctcaaggtccatccatgctggaacatgtgtcagaatctccttcctttttaaggctgacactattccattgtctgaatatcctgtagcacagaccgcttatcccttcttccatcaacggacacttgggctgctcccacgtcttggcgactgtgattagggctgctgtgaacatgggaacctctttccaagcccctgctttcaactgtttggagtatatccccaacagtgggattgctggatcatatgatagttccatttatcattttgtgaggatcctccatactgtcttccatagtggctgctccattttgtatgtggaagcccagcaatctgaatccacaacctgtgccctaaaattcaccatacttggtccacatcctgaagccacagggcctggggccacaaagatgaacggaactggggctcagagcccaggggggaagctgacacagcagcctgctgccccgacaatgcacaaaggggccactttgggacttcaggggtgtgggcagcacagaaaaatctaaatttgtaactgacatgtatgggaggaaaaataccacattccaggaactagtcacgttttcccaggctcagaatcccaattcttcatagggcccaagttactctcatccacaaatacaaagcactggcaagaaatacaaattatgatgcggcattttcagagcttgtcttaaaattcagaacaaagctcagtaaagggaccaagtctcgtttgtgttttctgctgaggttccaacttatatttagagctatttccctccagagtccagtgaaagacaagtcactctcttcgaagcaaacttttccacatgctcaagaaagttgacgcaggttggaatggatcccacccaagagccatgtgctgtgcatgcttctgggaggcagctgagctgcagatggggaggagggcactgtgccaggctcagatcccacccagccctcctggggacatctgctacagaggactttccctctggaagccaccctgcccagggcctcctctgctcctctgcactgccccatctgcagcagcctccagcctccctccctgcagcctccatgcccaggcagtttccttctgcagtctgccttccccaggaagcggtgagtgttgggtgtgagcctgtccttgtgctgggtagggtccgcccaggggcagcaccagaacagaatcactgcagaggtttccacggggtggaagccactaaccagccagagtagggacatgtcaggtccacaaacgctccctggccctcgagtgcctgaaatcattcctgctcttgcccatcccactccaggctcctcaggcctccgacctacctgcccatcctggtgcactcagcacccctccttcttcacccaggaaaacagaaggcctttgggcaaccttctcagcctctaatacctacctttccttcagctcggacccccgctccccgcctctgctggaccctaggtctacatctgtcccggctctgcggctacagagccctcagcttcctgcacactcagggcttctccctcttgaacctgccacctgcatcgtgcccctttcctccacagcccactcgcctgctctccttcccttccacagctcccacccacactgaacccactcccccagtaacgcaccaagtgttcacaggagctctcagctgctggatggagttggacccggtccagtgctcggggtcacccgggccttcgccaccctgccagacgcctctgcacgcccttcccttgtcttggtgggttcctcaggctcagttccagagtttctctttttgtgtctctttctgtctctgcagagctgtctggaggcctcacctccctggcagatcctgagcttcagaaccaaatactccacggcaccctgggcgttccacctgccccgtcctcgtcctcatttccaccaccctacccctcttcccgtgcttcagggcctcccagcccagtctctgagaaacctccctcactgtttgcccctctcccctctgttgtctaatgacacccaaacacctgcagaagaatcgcccagctcctgcgtctctggtacccagaggctgagcaggctggccctcgcccacagccccactgaggcctggcctcctaacatcccacccgcacccagctcagatgccaacgtgcccaaaggcgctgcccgatgacggctctctgccagatctctctggttttaagttcacctctcctgaccacagtgtgaaaggacagaggctctgagcaccggtgtgcctcctcccctcctctccggcattccctccaagcatccctgacctgtcccctccccagccccctgccaccaccaggcataaactcaaccttctaaccgtgctgaaatcttatttcctggaacgcgccaggccctgtctctttccacgtactgtttggtctgactagagaagatgtgcatttatccacttgccaattcctgccttttcctttcttaactcaggtgttgcttccctttggaagctttctgcctcctcaggcctggcgggtgcccctcctagtctcccccaggctccccagatgctccttgagggaccgtgcccaccttgtccaccccatgatccctgcacctcacacctatcctgaagcaaactaatcagtagttaaataagaggaggagggtacattacgggctgtgtgtgcgaccagtagctggtgggagcgggcttcctgcgcagaaagctgcaatatctgtggctttgtgtgtggaaagcgcctgtcactgaggtgggcatgcctccacatcaacacactgggccaggactcagtggggacggggcctccaggctgcggggtgctgccacaaccacatccatcctcccatccatccgccacctgcccacagccaagaaacagacagaagtgcccagcaaggcatggtgagccataccaaggaactgcaagcccctaacagctgtcagtcttattccactattgtattcccaatgtctagaacagtgcctggcaaacatgtggcttaacaaagatttgttaaagggatggataagtggataaaagcaaacctgtatccctaactggcgtgtgagaaatgaaaaaagcaatagccccacaccaaaggcacagtggaagggcttagaatgctcccctgagatctgtctatacacgggcactgtggagggagagggcccatgtccctgtcactaacagtgctaggcagtgtgcaggaaggatgctaacaggagagtctgttaaatccaacctaatgacaccttagcctcacgacaggttcccttctctccctcaactctctcttagggctcagactctcggtgacagcagttttttttttgtttttttttttgagatggagtctcactctgtcgcccagtctggaatgcagtggcatgatctcagctcactgcaacctccaactccctggttcaagcgatccttctgcctcagcctcccaagtagctgggattacaggcacgtgccaccacgccaagctaatttttgtatgtttagtagagacggggtttcaccatgttagccaggatggtctcgatctcctgacctcgtgatccgcccgcctcagcctcgcaaagtgctgggattacaggcgtgagccgccgtgcctggccagcaacagcggttctttttttttttttttttttttttttttttaatttatttttttattgataattcttgggtgtttctcacagagggggatttggcagggtcatgggacaatagtggagggaatgtcagcagataaacaagtgaacaaagatctctggttttcctaggcagaggaccctgcggccttccgcagtgtttgtgtccctgattacttgagattagggattggtgatgactcttaaggagcatgctgccttcaagcatctgtttaacaaagcacatcttgcaccgcccttaatccatttaaccctgagtggacacagcacatgtttcagagagcacggggttgggggtaaggtcacagatcaacaggatcccaaggcagaggaatttttcttagtgcagaacaaaatgaaaagtctcccatgtctacttctttctacacagacacggcaaccatccgatttctcaatcttttccccacctttcccgcctttctattccacaaagcagccattgtcatcctggcccgttctcaatgagctgttgggcacacctcccagacggggtggtggccgggcagaggggctcctcacttcccagtaggggcggccgggcagaggcgcccctcacctcccggacggggtggctggccgggcagaggggctcctcacttctcagacggggcggccgggcagagacgctcctcacctcccagatggggcggcggggcagaggcgctcctcacatctcagacgatgggcggccgggcagagacgctcctcacttcctagatgggatggcggccgggcggagacgctcctcacatcccagacgatgggcggccaggcagagacactcctcacttcccagacggggtggcagccgggcagaggctgcaatctcggcactttgggaggccaaggcaggcggctgctccttgccctcgggccccgcggggcccgtccgctcctccagccgctgcctcccgggcggcgctcgccggcgcggcggcaaagactgagacagctccgctgcccgctgaactccatcctcccggcggtcgggcggcggcggctgcggtcggtcgcggcagcggctccgcttcatatctgcagctggggcccgcgggcgtcagcgccgcgactgtcccggctccgcactgccccgggccgcagcgcagccgcgccaaccaccacccgcggccaccatggccggacgggctccctaagccaccgaccccagcccgcggcgccttcgagccttctcaacagcagttctttctgctgaacagcatcttgtagtctgcagtccttttcaccaattttatcatcttccctctctgcccgcagccccattttgtagatgaggaaactgtgggctcaggggcagaacgttgtcagcacagagcccaggcctcagaccgggaggccagtgccctgtctaccttcacaggccataaagccaatggctgctgcaaacccagctgctgtggggtgtgcagactcacaagtctcccatgaccaggcacacaatgtgcgtccatgaagggtccaggagcaatacagcagggagtatcaggctgtggggaacaagtggccgcgccctgcacaatgccacacaattctgacagggactgccaggtggaaaactgggccctgtgtggtctgatctcccagtttttccaagagaagccagaaatcatgattttaaaataaattttcctgatttttgagacattttcctagctggatgcatctcacaggtgtcagtttgcaaacccttgtctgcctgtgttaaaggatgtttgtctcactggtcactggtgctgcccatcactgtatctaagagcctagcacaggacatagcagccaccaggcctgtgataaatattgtctggtgtagtggttattggttgaatgaatgaatgatgtatagatggatgcatgggaggatagatggacagatagatggaggatggtcagatggatagagagttgggtgaatagatggtcagatgatggacagatgcatgggtagatggatggatgaatggtcagatggacagatggttggatgaaaggatgatggatagatggacagatgcatgggtggacagatgaagcatagatggaagatggtcagatggatagagagttgggtgaatggatggtcagatgatggacagatgcatgggtggatggatggatggatggatagatggaggatggttagatggatagatggtctgataaatggatggatggatgcatctgaatggttggacagatgcatgttggatggtcagacgggtgaatgcatcgaaggatggatggatggctggtaaggaaggagggaagactgggaaggaatcagtgtgtgactagtaagattggacagtccttgactttgctgccagagcagaggctcggtggaggtagccagtcattggttccccaactgtactgcagacagatctatcagttcctccaagaccccttcggaactgcaccaacacctcatacgactcctacatgttctcctcatcactgaagaactgatacggaagctactaaggccaaaggacaaaagctaggccattttggaccagggctcagggctctgtcgatgtgtttgggaagaaagcacctgtgaaacatctctcaatgtgacaaagccatgaaccaggttgccccatccatgatcaatgagacaaagcagacaggaggggagcacatgtgttcagaagtgaggtggaccagggttccaatttcagcccagccacatattagctatgtgaccttgagcaaatcccttctccttaagtgaagcttaagtgtttccatctgtaaaatgaggtcaggcgatccacttcctaccatgctggtgaggattcaatgagataacactctgtgcacgaccccagcatacagcctggtttatagcaaacaatccatcaatgttagtttaatttcattccattcagttgtccagacggtattaggaaacaaagaatttataggaataatttagaggaagtcacagtcctgtgtcactaaacaacagggttgtattctgacaaatgtgtccttaggtgattttgtcattgtgtgaacttcatagcatgtacttacacaaacctaggtggcagagcctactacacactgggctacgtggtgtagcctattgcccccaggctacaaaaccagcacagcttgtcactgtcctgaataccatagatgattgcaacacagtggtgaaagtatttatatatctaaacatacctaaacatataaatatggtattataatcttacgggaccaccatcatatatgtggtacatcgttgactgaaatgtggttatggggcacatgactttattacatttactcgctaaaactatttaaagctggccgggcgcggtggctcacacctgtaatcccagcactttgggaggccaaggcaggtggatcacgaggtcaggagatggagaccatcctggctaacacgctgaaaccccgtctcttctaaaaatacaaaaaattagccgggcgtggtggcaggcgcctgtattcccagctactcgggaggccgaggcaggagaatggtgtgaacccagcaggcggagcttgcagtgagccgagatggcgccattgcactccagcctgggtgacagagcaagactccatctcaaaaaaaaaaaaaaaaaaactatttaaagccaacatttaagaatgaggtaaactgtgcatcaattgatggatggataaacaaaatgtggtctaaccatgcaatggaatattattcagccatgaaaaggaatgaagcactgatggatgctacaacatggatgaaccctgaagtccttatgctaagtgaaagtcagaaacaaatggctacttattttatgattcaatgtatatgaaatatctagtctaggcacagtcacagagacaaagcagttaagaagttaccagtggctggggtcaggggtataaagggagttatttattaatggttacacagtttctgtttggagttatggaaaattttggcaatacgtagtggtgatggtagcacaacatattggggatgtaattcatgccaccaaattgtacccttcaaatggctagcatggtaatctttatgttatgtattttttaccacaacaacaaaaaaatttcaaacaaaccagaaaaagaataaggtcttagcaaaggaaggattcttccagtctgtctaaaaaaagaaagaactttgtgccatataaacattaaaaactttccgagttaactggatgaaggtgtcttttgccccttgagacctaaaacgtgttttcggtttatgaaatgaaatttggaaacgacctggatgttttgctttatgtaatttgggggcaggagagaggaaaaagagaaaaactaaccaggcgagttactgcctttggaaaacaaccaaccttagaatcgtgttttggtcctctcaaatgaagacatacatatttagcccacgtgagtcccagtccgcacagacatcacagcaacaggagaagtcatctaccacaccctaggaccggggaataactcgccacgcttccccattcagccaagagattgttcaaaagctgcacaaatgctaaccccagtcaaccatccacagctgccctcagcccacaactgtgcctgcccgagattgtgacgagccggtggtcagcacatgtaatgaagcaagggggtcactggagaaagaatgtacccaagggcaggcaatgcgcttgtatctgaggacaacggggacagtggtggagggcacgatagacgcgctgtctgtgatcctcccacagtctgatgacaggaccaacaccaaaagatgtgatccaagaaagcgctaagcacccatacaagagcactgcccaggaccagacgtggcctacggggactgccagtgagctctgcccgagggcatccttcccattcaagtctccccccagtctctgataagaagatccaccttgatgctatggaccccaagcgtggctttatggtacaattttaacacagagatcatttcgggaatgagttgggcatcccctgccctatactctatttctctggcccagcctcccatctatgtccagaactgaatgtaaaaaaactccagccaggcgtggtagctcatgcctgtaatcccagcactttgggaggctgaggcaggcagatcacctgaggtcaggagttcaagaccagcctgaccaacatgatgaaactctgtctctatttaaaaatatatatatatatatatacatatatatatatatacacatatatatatatatatatatagagagagagagagagagagagagacagagggagagacagagagagagagagagacagagagagagagagagagagagcgctaggtgtggtggtgcgcgcccgtaatcctagctatttgggaggctgaagcacgagaatcgcttgaacctgggaggaggaggttgcagtgagctgagactgctccactgcactccagcctgggcaacaagaacgaaactctgtctcaaaaaaaaaaaaaaaaaaaaaagaaaaagaaagagaaacctctatgatgtgcacaagttctgagcaatctacacggcctggagttgaagacacgtcactgggaaccgacgggccaggagcacctccaaagctctgcgcctgtctagccacagatggaaatcttcatctctgtgtccatggaagctcgaggatggtgctttcctgtcatttcctttcatttattgctttatcagtggccgtaagtgtttccatcaccaaccgaacagcatatgtaaacctgcacactctgaaaaaaattcattgaaacccggaatgatgaacaattggaaggagactctgctcaatgcaggcaacgcacattccagattctgacatccttgttctcccaagaatcactgctgggacgcagccacaacacaacctgagctgttacacggggagaggcaagttacactacctgggctctgaacacggctgtcactcactgcaaccactatttcctgagacctctcctatctacgacccttccttttcatgatctctgacaaggacttcaaaaatacaaacctccacaggaatgagcgtctgcggggacactggttctgtgtcatacgggagggtctctggtgtatcagccaggacctttatctccaagggtcagaacctgggtcacgctagcttaaataacaaagagaacgtactgcccctcttgactgaaaaatccaggaagattcaggtctggctggatccaggcactccaataacatcaccagggctctctccttccccatctgtcagctctgtttcctccatgttggcttcattcccaggggagccctcttcacactgtggccccccgcagctccagaccacatcctgcccgctctccccagtggaaagagaccctctctagttcagaagttccaggaaaatcctagaatctgtctcttatgagaataactgggtcacatgggtatcagcagagcctggtggtggggtcagcccatcccaagatacatagcttgggaatggggtaggggctttacccaaagggaaatcagggaactgtcacagaaaggatgggggatggatgtatccagaaaaaaataacccatgctcagcacaggcaaaggtcctggaaatggtcgggcattgacctgaccagctctggcctgtaccagcctcctcccccatggaccacctggccacacctgcccattctcctgcagacctggccaacttccaggccacgctgacccgaggcagggctggctcttgccctgctgcctgcctgacgcctcctatgcccctgaagcagggccttcttttttcataagggcccctgtctagagccctaacaggccatgtggctccacaacagacccacagatcactcactcactcacacactcgctcactcactcacgcagcaatgcagtcattcattcattcaacagctgtctgggagcccagcactctgcgggactccatttacacacgcaccacccacctaaactgcgtaactctttatgctacgtgttttcattttaagatgaagaaagaaactagggcaacaagaggttaaataactcggctaagctcacatggctggtaagaaatggcgacacagcgcgcagaccccaggacccgaaggctaagctcacatggctggtaagaaatggcgacacagcgcgcagaccccaggacccgaaggctaagctcacatggctggtaagaaatggcgacacagcgcgcagaccccgggacccgaaggctaagctcacatggctggtaagaaatggcgacacagcgcgcagaccccaggacccgaaggctaagctcacatggctggtaagaaatggcgacacagcgcgcagaccccaggacccgaaggctaagctcacatggctggtaagaaatggcgacacagcgcgcagaccccgggacccgaaggctaagctcacatggctggtaagaaatggcgacacagcgcgcagaccccaggacccgaaggctaagctcacatggctggtaagaaatggcgacacagcgcgcagaccccgggacccgaaggctaagctcacatggctggtaagaaatggcgacacagcgcgcagaccccgggacccgaaggctaagctcacatggctggtaagaaatggcgacacagcgcgcagaccccgggacccgaaggctaagctcacatggctggtaagaaatggcgacacagcgcgcagaccccaggacccgaaggctaagctcacatggctggtaagaaatggcgacacagcgcgcagaccccaggacccgaaggctttatctaaaacactcagtgcaaaatggaaaaagataatgtgtccaaggctcataggaaaaacttcattaacatgaaaaatgaagatcaggtaaaatgtatccacaggcaaagcacggcctaggccagaagcactggagaagagcccaaaactctttacacctcatcagctgccttaggaacacaggcctgacctcaagacctccatatacctctagagggaaagcaaactcatacaaacttgaagatggtaacagcttgaggtagtcagcactgcacaggcaggcccagcggaggcgagtgtcctcggagtgctgggaaggaagaaagcacaagggctgcagtaacccaagagggcttcctgaaggagagagggcagagggccagggaatgagcaggaaaggcatgtgggagagagtaggccctggggtcgactcctgtgggttttgcctttccaaaatccttcccatacttccagtagtacccttctggctgccccgggaactgcccctttgcctggatcagcccatgtgggtttgcagggagctgactctatcccctgacctggggggccaagcaaagccccacaccctctcagttacagtgacaggctcacgggacatgtagctgtggctggaccagggaacgtcctctatgggactctgctggcatgctgagcgagaaggacatgggcctggtggggaagtgtttgcctgagaatgaggccaacacacaggactgcagaacccagaggcgagcaagcccaccaggagggcatctgcggctcctgaaaccagtaaactccagagcccagtaaattctctttgaactggctgaagccagtttgagtcatgtttctgtcatctgcaataaaaagagtctgatgctgccgtggagcttcttgggggaagagaggggctagcgagtctacaatggggtgtttccactgctgggccaaggatagagggggttcaggcaagccacaaaggacctgagccccgaatgtggattcaaactcagactacagcccccagtgttccctcagcctcactcctctgctatccagacatggggctccataaatggcagctgtaagggtgaaagaatgagtccatcgcacgctcctgcactcctgtttattccattaactgccgtatgaaactgttcctatccttactcattcaaaccgctgccttccaaaaagacggcctcctttgtcctagcaccccagggtgccgtggtaggcaggagagggcccaggccaattacagccaggacggggagggggaagctgagtccggaagccaagccacatcttgcagggcacttggtgttgaagggggtcaaatccaagtcaaaaaagggggaagttggaccccagaagtggagcccagatgggtgtggacaagcagggctcagggaggcagcaaggcggggggccctcggtgaggagagtgggggacagcaccaggcatgctggcagcaaaagtgctggacctggggctggtctgagctgactgacactcaccctcgccctgagagctctcccttctgtgctggggtgaaggagccggggtctagatgtttccacaccgtccctgcagcctcctgactttctatgtgaagagccttggccttttccatctgtctgtcctgagatcagcggttgaccccctcatctctcttccctggggctctgccagctccaaggggcctccaggcaccccgcagccttctaagagaacgtctcctgctcaggttctatttccaggaagcggctggcccgggtggatggtgtgtcccaagcttgcctgggcacagcaccacgtacaaactgtcctcatgactcggttaccaacgaggggccaggggaggggtggcctctgccaagacctggagacaactgcacatccccagtggggcacaacctcagtcagccctgagtgcatgctgtgtgtgctcccggggaccccactgccttccactacaagctgccactcagacgcccctgcccacgcccctgccaggctccctgcagcctggatactggaaacctggcggaagcctgatgggcttggccccaggcaaatgcagcgtcttgttcctcagatacagcccgaaatggaaaatgccaagataaaacctttccaggatttcttggcatgaaatagctccccacattcacacacacaaaaggatgacttaagtgtacatgaatcagaaacacctggacacttttcttaaaataaaaccgaatttcacattcaaggggaaggcctagaacacatttggcattttggcaaataccggggcttttggctgtgacatctgtgcacctcagatgcggttcctgctccctgggcactgggactgccccagtccccgcctctggcctcctgccacctgttctacccctcagcttgctcacctcctggaaacccttgcccctcacctgtgacaagtcctggcttaaatattagccctcattaaagctcttcctcacctaagcccactcacgatcactcattcaccctttcaccatctcacacactccctacaggggagacctgtggtggtttctgctgtctccgctgcccccttttctgctaatgacagcctcatttttctccctgccttccctcatcccaggtcacaggtttcagtgggactgaccccactccccactcgcttcagggatgggcacacatctctgggctggtcttcactccctggccacagtgatgagttccaagatgagcaagtgacttgcactcattaaatgtgagtcaaggccgggcgcagtggctcacgcctgtaatcccagcactttgggaggccgaggcgggtgggtcacaaggtcagagtttgagaccagcctgaccaacatggagaaaccccatctctactaaaaatacaaaattagcagggcatagtggcacgtgcctgtaatcccagatactcgggaggttgaggcaggagaattgcctgaacccaggaggcggaggttccgacgcgctgagatcgcgccattgcactccagcctgggcaacaagagtgaaactccatctcaataaaacaagtgagtccatccctcaatgcttgcacttctcccgaaatgaagggaagaggtgttttgtgtccactgggatttctgatcccagagttcttggcagctgtcttgccactgcttagagacggtgtatcagttacctatcacctcaaaacaacatgacccaaaattcagtggcctaaagcatcaatgtattgtttctcaggattctatggcctcgcagggctgggcggttctgctccgcagagctacggctgaggtccctcgcggctgttctccttagggagttatctaagatgtctggaatgtctgatatggccttgtcgtccaaggactctctccatgtggcgtctcttcagccgacagtctagccctgggcttctttacgtctgggtggctggattccgtgaggatgtgttgcaagaggacaaccataatgagcaagcggctcctccagcctctacttgtatcacacttgctagtgtccagttggcccagacaaatcacagtgaagcccagagtcagtgtgggagggaactgcacgtggcgtgaagcccagagtcagtgtgggagggaactgcacgtggcgtgaccatcagacgcctggtttcttggggccccaagtgcaactgtgtaacactgaggtgcagggaggaatctcccttcagtcctggcacccagtgatgcctgaagtgagaaatctacccgtggcctttctagttacataaaccaaaatcaaacaaacaaaattcatttttttgctttattttgtcatgccactcagagttaagtttctgtcactgaccaatagagggacagacggtccctctgtgccaagcccagagtggacacgaggggcatagactgaaagcaggcaccgctgacttcacaggcagaagcgctcccaggcctctgtctccccagcgaaactacacatctcccgtgagtggggccagacctcaggcctgatttaaactcctcgtgtccagcatggtgccaggcacacaagaaagggccagtagaagcgtgtggatgaactgtgatcatagtgtacctttcaaacactgctgtataatgactctcaaagtcttgttttgtaaggtagcatctctcaaaatcaaccaggtattgtttacttttaagacgaaggaagatcccgctctagcagtcaggcctatctgataaagcctgttccataacagtttttctacggtcttgccctgagaagtctagcctctgttgaattctggaatagtgaaaatcagcgtgaaggaataggaacactgaatttgaaacctacagatgcacagcggttttaagcaggtccacacatcttttgagattcttcccatcaaaaggcagagtgtgggccaggtgtggtggctcaacctataatcccagcactttgggaagctgaggtggaaggatcatttgagctcaggagttcaaggccagcctgagcaatatggcaagactccgtctctgctaaaaataaaaaagattagccgggtgcagtggtgcgtgcctgtagtcccagctacccaggaggctgaggtgggaggatcacttgaccctggaaagtggagactgcagtgatccaagttgatgccactgcactcaagtctgggtgacagagaaagacctgtttcaaaaaaaaaggcagagtctaacttctgtcccctttgaatatgagccagacagaatcacttgcttctaatgaagagaaagtgacacagtgatactgcatggcttcccgggccacttaggaaaggcgatgcagcctcctcccagctccttcacacttagaacccagtggctaatttgtgaggaggccaagcagccagaccaaagaccaggtgtagatgttgcagccacagctccctccggctgaggtccctgccaccatccagcgtaacctgccagacaggtgagtgagcgagccttcagaggatcccagccccaacctcgttctagcctccctcccagctgacactgagtcagcagataccagctatctttgctgagccctaatgaaatagaagattcatgaatgaaataagcattaatttttttgaggtagagttttgctcttgtcgcccaggctggagtacagtggtgcgatctcagctcattgcaacctccatctcctgggttcatgagattctcctgcctcagcctcccaagtagctgggattacaggcacgcgccaccacgcctggctaattttgtattttttagtagacacggggtttttccatggggtcaggctggtctcaaattcccaacctcaggtaatccacttgcctcggcctctcgaagtggtgggattacaggtgtgagccaccgtgcctggctgaaataagcattttaagctatgaacttttgggatcatttgtaccacagcagtaggtaacgggaacaagatggaagggactgtagagataatacagttcaactctcccatttgagggatgggaaaaggtccagaagatggcagcgacttgccctaacatgacccagtgtggggtgggaacccaggtctcttgatggcaaatctagtgctctccgcatgacctgcctggggctgacacaactctcattccaaaccccctgtggcctgacctagctctgtcaagatgaaggtctgcctgttaaggatggagagatggaaagataaaaagagcctgggatcctgaaacacccctgagcagatacaccagccccggactttccgcctctggaattatcatcctgcaagaagataatccccccgtgtttaagttagggattctgttctcggcagccaaatgcaagcccaacggataggatggctttcagactgcactggattcaaagttcctactgtggtctttccaacttattttgttattgttgccaaaaaccatgtaactgagatgtaactaccaggggccaagctgagagagcttcccactgccctgctaggctgcccttgctgcgagcgagtgcatccttgcccatcctcggccttctaagcgatccctgccccggcatcctgcacgctccctctggccagtgcagcatgagaggagcctggttctcctctcagtcctggagtcaccgaaccacaacaccaaactcaaggtgggctgcctgagtcctcagaagggtgagacatgacaggtgacacagcccccagctgacaaccagatgcagggtggcccccagtggaaagatgcaaccagccacatcccatgagtgcaggctggctggggtgtgccatctgccgacgtgggcagagctcactcggagactcccctttttggtcctgttccagccaagatctgagtgacctccatccagaatcgaaaagctgagcctccaactgagggatgtgctccaggcacattgtttgccagcctgttgacttaatcaggttattccttagaaacaatcaggtcattaagaggaaactttagtaaccatgtcttgggcaaggcccctgggagaggctcattttgtggctgaaaacctggggatggaagtggcctttttaggagcagccttaagaaagggagcagcagaactgtcctcggaccaaatgctgcccatatgcagctacaagggcccccaaggtgccccaagaaacaacagtccagagacacagactcagccgagccccgagaagatgcagcttacagagccatctgcacctggcacttcactcgagtcaaacagaaaccccatacaggcgaggggctattactgttcccattttacagaaggggaaactgagtcttgaggcatttaagagacttttccaaggacacatgcaagtgaatgggcaccgtgactgggtgttgtgttccccagaaaaatgcacgtgttgaacccctaatcccaactgtgatgatggcatttggaggcggggctttgggaggtaattaggcatacatgcaatgatgaggatagggccccggtgatgggatttgggtcattacaagaagaggtaggaaagacaagagcagcttctctttctgacacgtgaggatgtggcaagaaggcagctgcctacaagccaggaagagaggcctcgccagaacccgaccacgctggccctgatcacagacccccagccttcagaactgtgtggaatcaacagctgttggttaagccctgagctgtggggtccctggctggaagctcctctgctctctcccttaacccctgccttgctggagcatcacttagcccctctgagagtcactttccctgtctgtaagatggggaaatgcctgccctacaggggattctaaggaaaaatgagattgtgactaccttggagatctgagaactaggaagctctgaggctgtacagatgaaactattttttttattgcggtaaagtgtatgcagcataaaatttaccattttagctattcttaagtgcacaattcactggcattaagtacattcacaatgttgtgcaaccatcaccaccatccgttgctagaacgttttcatcatccacacggaaactttgtgcccatggaataactccctcagcccgtggcaaccgtgactccactccttctccaggactactctaactgcttcatgaagtggaatgctacagtgtgtgtctttgcgactggcttatttcactcagcatgacatcctcaagcttcatccatgttgtagcatgtgtcggagtttcttttttttgagacacggtctcgctctgtcatccaggctggagtgcagtggcgtgatctcggctcactgcaaccttcacctcccaggttcaagtgattctcctgcctcaacctcccgagtagctgggactacaggtgtgcaccaccacgcccggctaatttttgtattttttagtagagatggggtttcaccatattggacaagctggtcttgaactcctgacctcgtgatccgcctgcctcagcctcccaaagtgctgggattacaggcatgagccaccacacccagccgtttccttcctttttaaggctgaataatgttccactgaaggaatatataatatataaaaatattttgtatcattcgtctattgaaaaggaagctcattccttagggaggcttcagtggacacccagtgtgaaccccacacacagacttcctcccacactggagtttggtccagtatcagcaaactctctctctccttccttcaaatcactctcaggtcctgcctcccacaggctacaaataacctgacagtctctccattaatattggatggccaaattctgcatgccttaggccactggggctgcggtaacaaaataccatagactgggtggcttataaatgtttatttcttgcagttctggaggctgggaagtccaagatcaaggtgccacaggctcagaggccagtgagggtctgagtcctcatagacaaccatcttattgtaccttcacacggtggaaggaaaaacaggcctttctggggttcatttcctaagggcaataatgccactcatgagagctccaccgtcatgacttaaccaccttccaaaggccccgcctcccaacacccccgccttcacggtgaggattttgctgtacgaattcgcagggacataaaactctgtccatcacatgttgtaagggagggggcactgggctcagccccatcgctcactggccaagtcagaaatagcgcacagaggccagggcggtggctcacacctgttaatcccagcaatttgggaggccaaggcgggcagatcacgaggtcaggagtttgagaccagcttgaccaacatggtgaaattccatctctactaaaaatctaaaaattagctgggcatagtggctcatgcctgtaatcccagctactcggtaggttgaagcaggagaatcgcttgaacccgggaggcggaggttgcagtgagccaagatcgtgccactgcactccagcctgggcgacagagcaagactccaaaaaacaaaaaagaacagaaaagaaacagtgcacagagcacatgtgcacgaccagattacagtacaggccctgccccacactctcattaaatccccataaaaactctaccaggtagctagcacttttcctgttgactaaaagaggttattacacataattttgcttaaaatccacagattccttctttttcctttttcttttttttttttttttgagcagagtttcacttttgtcgcccaggctggagtgcggtggcgtgatttcggctcactgcaacctctgcctccagtgttcaagcgattctcctgcctcagcctccccccagtagctgggattacaggcgcctgctaccacacccggctaattttttgtatttttagcagagacagggtttcaccatgttgaccacgttggtctcaaactccggacctcaagtgatctgcccgcctcagcctcccaaagtgctgggattacaggcgtgagccaccgtgcccagcccacagcttccttctgactccagaactcatgctgaaggccctgacgctctcagagccctggcttccttatctactccaacaggctgccaagcctcggttacacacagctcccttctggctccagcactccgtgggtgtgggcaaggccacaagctgagcatgctcctgtgagcaccaaacaagacaaggactctgaaggcgctctgtataccgcatgccaggcatcactctcccacgcacagaacagcagtgcgcagcccagaggcccagctggcggctcacagggaaccctggtgcctcagcccctccaggccagggtcagaagcctgggctacagaaacacaaggcgtggtcacaggaacatgcaaacactgggaaagaaccaggggtgggacgtgactccaggagctggaggcagacccatcaccctgcatcctgtctgaagggcgccgtgtgcccagcacgaagtgcacagagccaagagaggaggtcccaagtgctcacctgagccagagtccccagccccatcgtggagagggctgtgagagggtgggcatcccgccatgtggccctgaggtcaggccctatctgcggggcaagggaggtgcctggcccagtgtgagggtcctggtcaggggattccggccaccttttgccattgtctgttctgacccctggattcccaggacccgagagggtcatgacccatcagggcaagggccaggccccgggccttcctccaggtaaaatgctgacaaccctctgaggtggaaactgtccccagggatctggtctgccagaggctgtccctggctctgaggccaccagcaaggcagccactacggaggatgggccttcaatacagaaatctcctttgaggaacaattcactgccattcccacaaggttgtcgtcaccctcggctggggacgcggctcatgccgcaggggtgctcggggagtgtggcttccccggtctgcctgcctcctcacgggagaaccacgaagagatggagacaacagcaccctgacagaccaggggatggaccggcgtggaaagccccagtggggcttagagagcctctcacatcccgaccacatcaccgggaaactctagcacagttcctcgctatgctcacaaaacccacagggcccgaatctgatgtcagggtcccaggtgtggctgcttcctctgcttcagtgtccacactgtctacaggttgtacaataaggaccaatcaccggatgcatcatccagaccatggacaggtgcagtcagtcaccctcagtcccctgcaaggtctgaggcctgctgggagcctcccaagcctgatggcctcacacttctaggcccacagcactgagtcccaggccctgagctccggtacctgctgcacaggcccattcagggtgcgatgagggcatccctatgcggctcggtcccattcttgaaagcgatgatgaccctacagaggctctgggaggggctgggacagcccagaggtttcccggggaggtggggcatgtgctgagggggtggaggatgcacatttgggtcagagctggagagccagatgtgagcttttggcagccacagctctactgagccctccgccccaggccctggtgacacctgggctgatttatggttctaccacggggcctgcactgggagcagccattaggatctgaccctgcagagccacacaggcccatcctcaccgccgacggctgctcctctgctcttccggtccactcctgcttaccttccagagacacatacggcactggcctgggccagactcctcacacctctgagctgtggaacacagcgggtgacatgatttccatggaaggcgtagagggagggggtcccacatacaggccgggggtgacagggagaggagcacccctgaccacccgtgtccccatctctagacttctcttaggggggtctggggcttgtagacgtgccatcaggttcctgcgaggccccctccctgccgcaccctcagggtctgccagtgtgggcctgaggcccggggtcgtattcagattctgccagaagaaagagctccagcactcagagtcagaaaccactggcctcagcagctcacagatggggaaaccgaggccgggtggggctgggtgaagggcaagcgatatttcctgggtcatagaactagtaccgaggagaggagaacagtgtccacagatgcctgggactgacggaggacaaggggtgtcctcagagggagtctgtggcagggggtgctggcatgggctccccactcagcagacatgagggccggacctgtccctctcttgtctgggtgacaattctgtaaaatggacaccacggtctgccgaaggcggctgtggggcagcatccagccacagggcaaggccatgacaggcgccttctttactgaaactgtgtgtgcaagtggtaaaatatacacggcatgacgtttacgtggtgaaacgtgcgcggcacgacgtttaagtggtaaaatacgtggcatgacgtttcccatggcagccacaagtgcacggctcagtggcggtaagtacattcacactgtcgtgccaccatcaccacgtccgcctccagagctcttcaacttcccaaacagaagctgtccccgttctccctggctagcccctggcactcaccccaggtacctcctatgagtggaatcacacagtatccgtcctgttgtgactggcttagtcgaattcatccacgtttgcagcctgtgccacaatttccttcctttctgaggctgaatcgtatgctattgtatggatatgctgcattctgtttgtctattcatctgtgctacagctcatcatcatcctgagcacagaggagctgaaggggagatgttcctccctcctcctcacacaagagccccagagggctcgtttaccgctcagggctgggcattccacctctaggcagattcccgcagaagctcacactggaagaaacttaacgcctctctacctaactggagtgaaaagctgcttgtttttttatctttctaacttccagtttgtcagggacccacgcttttataaaatacactaaaatgatggggtagaaaaatgaaatttaaataaccaaaaacataaaagtacttgcccattttattaaaaaattagattcagtagacataaaattactgtttaaattgctttcataaaagtttccacacattctccatttctattctaatcttgttagagaaccataacaaacagttcaagggctggcatccatttgcaaaccacattttgagtagcacagcctggagcactgtttcacagcaaacttaaacaactaaatgcccatcaataaggtagctgttaaatatgctttggtatatccctattattatttagcaataaaaaataatgaagcacgtgagttagcaattccagtcctagctatctacccaagagaaatgaaaacatatgttcccacacacacttgtacaagaatgttcatggcagcactatgcctaataagcaaacagtggaaacccacatgtccatcaactgatgaaaggataaacacactgtggagtagccatacaacagaacattactcagccataaaaaaagaatcaagtatggatacatagtagagcacgaatgaaccttgacaatattacactaagtaaaagaagccggatgaaaaaggccacatgttgtgtgattccatttccatgagatgtccggaaaaggcaaggctttagagaaattaaatagattcgtggttggcagggcctgtaggaaggggcttaggggttaacggctaaggggacagggtttctgtgtggggcaatgaaaatgttctgaaaataactgtggaagtggttgcacaactctgtgtatactctaagaaccactgaattgcatactttaaacagatgaaccgtacggtgtctgacttcaatcttaataaagctgttatgagaaataatgaggccgagcacggtggctcacgcctgtaatcccagcaatttgggaagccgaggtggatggatcacctgaggtcaggagttcgagaccagcctggccaacctggtgaaatcctgtctctactaaaaacacaaaaattagctgggcatggtgacagtgcctgtaatcccagctacttgagaggctgaagcaggagaatcacttgaacccgggaggcggaggttgcagtgagctgagattgcgccattgcactccggcctgggtgacagagcaagactctgtctcaaaaaaaaaaaaaaaaaaaaaaagaaaaagaaagaaagggaaaaaaaagaaataatgaagcagagttctctattaaaacatgtgacttaattacttaaaatctaaagaaaattctaggcctggatattttcaccagtgaattcttccaaacacttcagaaaaaaagcaacactaaaccttacacatttttttccagagaatagaaatggggtaacatttcccaacttgttctgagaccagcataaccttataccaaaactggaccacagaagaacacatattagaccatctttctataaagaccgatgcaaatcctaaacaaaagattagcaaattgaatccagcaacatattaaaataatatatcccatccaactggcgtttattccaggaatgcaagcgtggttaccatcctaaaaatcaattaatataatgcactgttttgacagaaaaaagggggaaaagtcatatgatcatctcataaatttagaaacactatttgacaaactgtaacacctaatcatcactttttacaaaagccctttaatatttcctctgagttcagttatgaaaccaggatgcctgctatttccaattctattcagcactactgaaggtcttagacaatcaattaatcaagtgaaagaaacaaaaggcataagaattggaaaggaacaaacacaactctaattatttatagatggtatggtagaagatacatggaaaatctaaaaatattagaattaacaagtacatgtggcaaggtaactagatacaagaccaacatgaaaagtcatcaccaacagaaagcaaattttaaaaatattattatttaatattcacacaacatttaaattcttacctatctacacaagttcacacacaaaaaattaaattctaagaataaatctaataaaagatgtgtaagacctctactctcaaaactataaaacattatcaaacaaaattaaagaagactcaaatacatggagagagataccatgttcatgaatcggaggcctgaagagtgtaaagatgtcactctgtctaaattaatacatattcaatgaatctcattcaaaatctcagcagggtggctgggcgtggtggctcatgcctgcagtcccagcactttgggaggctgacgtgggaggatggcttgagcctaggagtttaagaccagcctgggcaacacagtgagactccatctctacaaaaaaatctctgcaaaaggaagccaggtgtgttggtgagtgcctgtggtcccagctactcagggggctgaggtgggaggatcgcctgagcttgggaggtccaggctccagcgggccatgttcacgtctctgaactccagcctaggtggacagaacaagaccctgtctcaaaaaatgaaacaaagaaataatttttaaaaatctcagcagggctgtttatcttttttatttttaagggaattgtcaaacattttaaactttctatggaagtgcaaatgactgagaacagtcaaggcaatcctgaaaatctaacctctattctattatcaatactaactatcaagttttgggaattaaaataacagtatcgacacatggatagacaaatagaacagaacagcaaaaagatccaaaaacagacctacaaagccaccagaataactaaaagaaaagagacagaaaatccaagtgttggggaggatgcagagcaactggaattgtcaaacacactgggtgggactatcaccctctttcaaaaatgatttggggccgggcacagtggctcatgcctgtaatcccagcactttgggaggccaaggcgggtggatcacttgaggccaggagttcaagaccagcctgggcgacatggtgaaaccccgtctctaccagaaatacaaaaattagccgggtgtggtggtcctcgctgcttgggaggctgaggcaggagaatcgctggaacccaggaggtggaggttgcagtgatctgagaccttgccactgcactccagcctgggtgacagagtgagactctgtctcagaagatttggaactatttactaaacataacatatgtataccttacgcccagcaattctgctgtaaggtttgtacacaacagaaatgcatacgtatgttcactgaaagacatatactacattgttcgcagcagctctcttcacgacaaaaactggttactacccaaatgcccaacaacaatgcacaaatgaataaccctcaactgcatgcagcaacatagatgaatctcacaaacaatgctgaattgcagacacaagaatccataccacgtgcttctatatgaagttcaaatgcaggcagaaccagtctcttaggtgagaaatcgggattatgtgccctggggacactaggggagtctgtgggggtctggccaggtgctgtttcttggcctggacacaggtgtgagctgcaaacttacgatatgtgctcttgcttgtagcaggttacatctttttattgttgttttgagatggagtttcactcttgtcgcccaggctggagtgcagtggcacaatcttggctcactgcaacctccgcctcccgggttcaagcagttctcgagcctcagtctcccgagtagctgggactacaggcacctgccaccacaaccaactaattacaggcacgcgccaccacaaccagctaatttttgtatttttattagagacggggttttgccacgttggccaggctggtctcgcccgcctcagcctcccaaagtgctgggattacaaaagtgagccaccgtgcccggccctgtagctggttacattttaataaaaagtttgtaaaaattcggcagacatcagaggtactgataagtttattaaagtgacaaaagctataatgggtggcagagtcacagaatattaagtgtgtgaggaccctctgcctttctgcccctgaaggaagggcctgcgctggtcactgcagccatccctctggctgaccgggggaaagaacagaaagaccagagtgagagagtgctggaaacaaaccagaaggctcttacatcggaaagggtgaaaactactggtgtggaaagaaatgtggaagaggtccaggaaggcagggaagaaaaaataccagagctctagacagaaaaatgggaaggtggagaggaagggggaggggagggctgggagctctggggagagttccctctctgactcctttgatggcgttttggtgtaaatctgaacagtctctgagtaagaacggccgggcctctggggttcatttaggttgggctgccagagaatggtgctcctatactgcgaagtcaaaacaatttttaaaagtgtgtttataccatgcattattttatttctgtaaaaattaaaatgtgtatcatatgttaaagcacagcaaaagctctgacagaacacagactacactcatacaatactgacatcctagggcatgggattagatggggtggtgagatgcgagtacagggagactttcttttaactgtggagctgtgtgtgttcgagggttggagagtgagatccttttgagagcataattggcttgttttttttttttttgagccggagtttcgcgcttgtcgcccaggctggagtgcaatggcgcgatctcggctcactgcaacctccgcctcccaggttcaaccgattctcctgcctcagcctcccgggtagctggaactacaggcatgcaccaccacaccttgctaattttgtatttttagtagagacaaggtttcaccacgttggccaggctggtcgtcaactcccaacctcaggtgattctcccaccttggcctcccaaagtgctgggattacaggcgtgagccaccgcgcctgacctatagttggtttttataacagtccttttttaaaaaaataaaaggatgacagcctgctcaaaagactggggccataggggttcttcaggaagaagaaaaaggcgtgttcagttatgaaataagccactcctaatagtcctaaacaatgcctggagtgagccccgggggattgtgacccttccacaggcggctgcagggtctgagtctccacctttggtgttgtgggtggcggaggcagataccagtacacctgggcctgcatctctcagctcctcctccatcacctccaccttctttcaccaaaacggcctgtcttagcctgttcatgctgctataacaaaatactatgaattgcatggcttacagatttagtctgtgggggctgctctaagaaaacctaccagtggcttgcaaaaaagactgggtggcctacaaacaaggacaatgtattgctcacagttctggaggctgtaaggcgcctgcagattcagcgtctggtgaggccgtttcctggttcatggatgatgccttctccctataacctcacagggtcgtaggggtgaaaaagctccctggggtcccttttctaagggcactaatcccatcacaagggctccactctcataccctaatcacctcctaacaccattaccttggagattaggatttcaacatatgactttgggacacaagattcagtccacagcataatctccggggcatgtccctccttacactctccctcctcctgcaagcactcttcccacctgagtttatcaccccacacagtcccctcccatgcaacccttccttccccttcccaccccaccacctcccactgaagtaaagggactagtgcccagggaacagagctcgccgcttacagagcccccagcccagcccctgctggagctcctggatcccaaggcggggaaggcaagtcggcggatgcgcacttcagggaggacgcaggcgcagggccggggagctgggaggcaccactttgccctcctgaaaattaagcccaagacctgccatggcggtggggagcagtctccctcagatggggtcccctgttctctccacctgccccagaaaacagcaagaccggtggccacccccgctgtgagtactctgaggcccagaggtacagctaggaagcatgtccctcctgggtacagctgacatgtgagcaagcactttggccagcacagccggcctctatccccactgtgagacgggcggtgccacaaatgggaggtgacgatcaggggcggtcaccttccagtcctgtaagtggcaaagctcagaggcactgtgggctcagcctccaggtcacctgctgcccccgtgccactggggtagtacgttcgggccagacgtggtggctcatagctgtaaccccagcactttgggaggccaaagcgggtggattggtggagcccaggagtttgagaccagggaggccaggctgagcaacacagcaaaccccgtctctagaacaacaacaacaaaaaaagaaaaattaacaaaatttagccaggtgtggtggcacgtgcctgtagtcccagctacttgggaggctgaggtaagaggatcattgagcccgggaattcaaggctgcagtgagccgtgatcattgcactccagcctgggcaaccgagtgagatcctgactctaaggaaacaataacaataaataaaaataaataaagtagtacattccccacagtatgagggccatagagggggtggggggtgttctagttcctgatgggggaggcgggtgcccctcatgggtggtctgggcatcctctgttccctgggctatgccctcctcttgagcccccacgcccctcacagtctcaggctacggcactttgagcctctccctgtgctggcccaacagggggctcaggttccgcacgaggctacttctaaagacatgaccggacaacaggccacttcaagcccattagtgtcatgaaactcatgacctcacagggaaggcagctctcccagcattcagtcctatttctaaaggcagaactgaaaagaatgaaaagaacagtgggtgccaggggcggggaggaacaagagcctttgggaaactgcaaggggacacggaagaaaaggactttaacactcggcctgccaataacctacagggcagcaaaaggaacctcgagttcaagggctctcctaaaagccaggagttgctttctctccatgattgagcagaaggtctgctgagggattctggccccaagtgaaccgagggtctaagcagggatgatgtgcttttccacagggcagccacagaaggaacttgcaccctggcacaagctgcaggcacagctccctcctatcacccccacatcccactgcctgaggtccacaggtcgattcccacagggatacatgaacagacatatttgatgcctactgtgtgccaagcatttccacataaacttgcctcagtttatcctcaaaacaaacccatagggtacatcgtattaccccattttatgcacaaggagttggagagttttaagaattaggtaactggctcaagttcccagagctgggcccacctgcatccaaaccctgacacccctcctccacgaggcaccctagattccaaggagccgggaggctgcccgggaggtgctcaccctatgtctcagccctgccctggaagcctcaggctgaggggtggccacagggtccccacctggccagtaagactctatctcccctccacctcaaacagagccatgcacacatgaaatatggggtggcggggggcagatatgtgtaagaggcctcctgttcccgaggtgggggtatcacccctccattcctagatcccgttcctgcctaaattccggaaccaccctgcaccccatccttcccaagcctcaatcctcatgcatttcttccactgttcgccacttttgtctagataggcagaggagctggtttctgttgccagcaaccacaggatgctaacttgttcaccagccatctcagctcttctcccaggaccctccctggatcccctccctcctctctgctcccaggatgagggtgcagaccctgcaaagctggccgtctgccccccagagctgcctcgtcctgacactgggggccgtcccagggcctggctgcggtgacgcgccactaacacttactggacgatgaggtaaaaggactgagggttcacgagggcagagtgggactgggatgagggaaccaaatgcaaggatgaagggaaaacagaaaactgtccaggtttctgccacagccagtcctatttgtaccatgtagcaagggcagctatttctgtccgtgacacccgcttccatcagccccacaaggacagaaggcagcctgaggcaactccgtgccaaaggtgtgggcttggcaggctcacagcagagattgtgggcaccatctctgcaaggccaggggcacccgagctgtggggcagcacaaggggcctgtgtgaggcccctggaggaacacggaggaggcacaggggctccagggcagagaagccggagggaagccgctcgcatgcagagtggccttccaagcttggggggcatccttctgggagcgcctgggtccacagagctcccaaactctgctcaattcaggcaatttgggaagtaaaacaggaaatgtcagctgcaaaaggtagagaaggcttttcagggaaggtatttccaaactatttccccgtagggaatacatttccgtgacactgagtggcaagtaccccgacagtatctgattcacgccagcaccgagctaaatgcaaatgactttcaatcatcagcccctggggcacactcggaactcagcagagccgagccctggcccaagtcacctctatgaccggcagtgagaaaaaaggcgggtggcgagaacatgggaaagaacatgggtaagaatattggctctcctgggccagattttggacttgatagtccccataatcacgtgagccaattccttcaaataaatctctttatgcatgcacgtgtgggcacacacacccacacacccacacacacacccacacatccccatacacacccccacacccacacactcacacccacaaacacacccacacacccccatacacacccccacacacacctacacccacacccccacaaccacccacacacacaccccccacacacacccacccacacccccccacacacacacaccccccatacacaccccccacacacccaccccccacacacccacacacacacccatacacaccccccacacccacacacccaccccacacacccccacacccacacctatacccacatacccaccccccacacaccccccacacacactgacacacacccccacacccacccacctacacacccccacacccacccacctacacacacccacacccacacccccatacacacccacaccccacacccacccatacacacatcccacacgcacacttacacccacacccaccccccacacacacccacacacctacacccacatacccacacccaccccccacacacccccatacccacccacacacacccacccacaaacacacccacccccacacccacacacacataccccccctcacccccacacacacaccctattggttctgtttctctggggaaccttggcaaactctgtaaagaacaaagaggcctgctggactctgggctaaggaaggcagccagcatagcagcatcactcccggcaccgtgtgtacagatgtagtcagaatcactgtgacaaatgcccactccggccgggccctgcactgctgcctccaccttttttgggccatttaatccaagggctgattgcatatctcctctcatatgtcccacagtcatgccaaaattaacagatctcaacaaactcttaatcgtccccatcctggtcctgctctcatcctggcaagtggcaccagtgagttcccaactcaaaaatctgggcatcatccaaaaaccgggagtcacccgatcttccctctcccttgctccccctcactcagtccacctccacgtcctgccaatgtcctgtggggatccctatccacatcctttgcctattcttttttttttttttttttgagacagagtctcattctgtcaccaagctggagtgcagtggcgcaatctcggctccctgcaacctctgtttcccatctttgcccattctttactagagcctctggcttgtccttattcttgtataagagcactttatatctcatgcatattaactatgtatttgttgtatgtgttgaaattgttttttcattttgtcacttattttcaaacttaaggtggcatttgctttctatacagaatttttaaaaatgtccatcaaggctttttaatagcaaaaacaacaaaaacttaaataaaaataaatgtctatcagcagcagacgagatgaatagtagtatgttcatacactgcgatggcatgctgcagtgctccattgtagaaacgacagtcacaggaaatgactagacctgcaagcatccatacaaatacttctttttttttgagatggagtctcgctctgttgcccaggctggagtgcaatggcacgatctcggctcactgcaacctccgcttcccaggttcaagcaattctcctgcctcagccccgaggagctgggataacaggcgcatgccaccacacccggctaatttttgtatttttagtagagacggggtttcaccatgttggtcaggctggtctcgaactcctgacctcaggttatccacccgcctcggcctcccaaagtgctgggattacaggcatgagccaccatgcccggacccatacaaatacttcttgaaaaaaaaaatgaagggataaaacagatgaaaagacacacaaataacaagtagtaggacaataaaatatattgccatggtacacatatttaataaaatataatatacagaaaacatgcagaaaaagtatagctaccaactcaagacatttgttgcctggcagagaataggggaatgggagaggaactggtaccttggctctgtctaaaacatttcatttcttggccaggcacgatggctcatgcctgtaatcccatcactttgggaggctgaggtgggcagatcacctgaggtcaggagtttgagaccagcctgacaaatatggtgaaaccctgtctctactaaatacaaaaaattagccaggcgtggtggtgtgctcctgtaatcccagctacgtgagaagctgaggcaggagaatcgcttgaatccgggaggcagaggttgcagtgagccgagattgcaccattgcactccagcctggacaacaagagcagaatcctgtctcaaaaaacaaaacaaaaacaaaaacaaaaacaatttctttaacaacaaaataacaaacatgagaaaatgatgttattcattaaatctagatgaaacggacatcagtattatattcttctctgtacttttttatatatttgaaacattctgtaatgaaaattaaaattattttttaatattaagtaaagaaaggatctggttgggcaaaagaatgatcagatacctccatgagactccattcttgcttctagcaaattaccataatgtgcaaatatatcatttctggaatctgaagtgctctactcccaggaaactaggaaacctagcaagttgttttatctgtgagagctgatctgagttcacataacttcacttagtttttgcccaaatatgtaaactaaagaagatttttctgtctatacagaaaatttaaccttttaagcttaaaatgttcaaggaaatgttttcttctatggcaaggtttttcaacctgggcactactaacatttgggaccggatagttctttgtggtggtggctgtcctgggctttgtaggacactcaacagcacccctgcctctacctagtccatatgccagtagcacccacaaagtatgatcaactacaaatgtctccaaatactgccatgtgacctcctgggggcaaaacagtcccagttgagaagcacggctttatggtttctgacttcagtgccaggcttataaaatctgtttctactgcgtaattttaaaaagtgatgtatcgtatttttgtctagccagccatggttgtattttttacatttagatcttcaatccatgtggaatataccccggcataagaagtcaggtaagaagccagatagtattactgcactgaacctgtcccccaggaaaggccgctacagcatgtgggtgagctcctggcataggggggcgtgtgataatgacaccccacagagtaaaaggctgcacctgtcactcaatagttggcacggagttggccaagctggggtcaagacagctctggtcttgtcttcccagagtttcagggattctccactacaattaaacctgatggtgctctgtaagtactgggtcagtggcaaatgttctagaaatctgttttctaacagatagtctacctttcacagaatcttcatcatctccccaaaccaacagcaaaccgcttgattctggaaccatctggaaaattctgagggtcttccatttttggagagaaacaccagagcaggtggttaactttgtgtgtcactgctcttggtttgaacttttgtgtgctttctagtaattttaaaatatatattaatatattatatgttatatattatattaatatattttatatttatatatttaaatatatataaattatttttcttttacattcctgttcaatttctatagaatttaatgagtataatgggctccatctagtggtcacaagaacatctccagattccaatggtcagcacagaaacttcaagatctttatttataggacatgacacattttataattgatagactcaggtggttaaactatgctttaagagaagacttctaattatttttttcctttcatcagtgggtcttacaaattggttcttaaggtccactgcccaaaaccatgcttaccatcttctcttccaaattgatccctctttggggatttcctgtttctgcgcagcttcccctccccaaaggcatgctgcttcaggcttctctgtcttctcctgtgcccacccacccagtttgtgagttctgtccaccacatgacccagtgcctctcacagctgttcccggctatcaattctcatggccattcgacagggcgttatcaaccctcctccccgtgcctggcaccgtgctggatttaggggatgctgcagtgaaccaggcaagctgtctcctgccctgagcaccccctcaggggcccctctgttggaaccaagtatgatctagtctgtccttcatgctgtttccagagccctcgtcttaaagctaaattccactcagacaccatcaactgtgtcccatggaataaagcctcaatctctccagaccctggactcaccctcccctcccactgccaccttccaagcaaacaagagttcccaccggtgctcggagctcccctctgcctccactcaggatgtcagtctctcagaatgcatcccccatcccaggtggctaacctgacaaccagtcttcaaaaccttgcccaattatcatcttccccaggaaggaccctcctccaacccagatcctcctgacccgaagtgatctctccttgtaatttctgtaggactggtgtttcctcagggctcatcctattctccgcatctgttatgggtcttgtacctctcctgccttcctctaacaactgggtctgcaattgcctctaagaatcttagtcaatagctcccccaggaccagcacaaaatagggtaggagagacgaatgaatgaatgaatgaatgaacaaatacctatgcatagtgaagcgagggaatggcaaccagcctccagagtattctcgtgccccccaaaaaatcagacacacaaatgacctcctttcacttggcagagtctgacataccaaggtagctgccttataggccactcaattttgccataaactcaagtcgactgagatttaatgcttataaatatatacgtgtatcattttaaaaaattctataaaaaataatcccaaaaagggtaacaatttcttgcattgaaatcctatgagaggctgggcaaggtggctcacccctgtaatcccagcactttgggaggggatcttttgaaagcaggagttcgagacctgcctgggcaaaaaagtgagctcctaactcaccaaaaaaaattaaaaaaaaaaaaaaaaaaatttttttcagacagagtctcactctgtcgccaggctggggtgcagtggtgcgatcttggctcactgcaacctctacctcccgggttcaagtgattctcctgcctcagtctcctgagtagctgggactacaggcgcgtgccaccacacctggctaatttttgtatttttagtagaggatttcaccatgttggccaggatggtcttgatcttctgaccttgtgatccccccgccttggcctcccaaagtgctgggattacaggcgtgagccactgcgcctggccaggaaaattttttttaattagccatggtggcacacgcctgtggtcccagctattatcccggctgaggcaggaggatcacttgagctcaggagttcaaggttgcagtgaaccgtgactgcaccactgcacttctgcctggccgacagagtgagatcctatcttaaaaaaaaaaaaaaaaaaagtcccaagacagcgtgtgcccttcgctaggctcttttccagccaacaaaggcagtaaggcagtaaacaggctgaatatgagcaacttttaccacttctgttccgctctgtgacattttccataaactatcaacgaaatgtatcaggttctgtataacttccacattgtgctttctacggtcctaagtggagtttcactcctctacgcaaactgccaaatgttttgatggagcagaggatttctgacttgcattaaactctggattattattcatttctggaaaatcacccgacattgcaagtacagtgcccatccttggaaaccaagcacaatgtctctgcaatattctgcaaggatccaaaaagacacaaaaagaaaacgaaaaggatgataccattctggaatgttcctgacaatgtccaggcagtttgagcctggttagtaacaagtgcaaacagcgtgacgggcagaagcccagctctgctcgaggccttctgggcacgtgggtggctgatgagggttcacggccacacactttccttttctgtttctctcactccagcatcgccagcatcttcatacccacgtcctagaagaacgtgccagtaaagtctgccaagccctcgctcttcccctcctgaagattcccagtggcctcctactctgtgtctcttctcccttcctctctggcagctcccgactgatggcgacggacctaacaacagacaagctctgaggacgcagtgccaggcctcgttctaagctgtctgcacatgtgaacccatttgatcctcaaaaccatcccatgacacagctactctcagaaaccccacttcacttcacaggtggaaaaccgaggcacaaggaggataagtgtgaggtcacggagccggtgagcaacagagaatcgggccacgcagcctagatgggaagtcaacacactttcccctgggccacgctgcctcttggtgtgttttattttttcctttcttctttttttttttctttgagatggagtctcgctctgtcacccaggctggggtgcaatggctcaatcttggctcactgcaacctctgcctcctgagttcaagcaatcctcctgcctcagcctcctaagtaactgggattacaggcgtgtgccactatgcccagctaatttttgcatttttagtagagacggggtttcgccatgttggccaggctgctctcgaactcctgacctgaggtgatctgcccacttcggcctcccaaagtgctggaattacagatgtgtgccaccacgcccagccctcctggtgtgctttaagtggagccaaccctttggttacacctttgcaaaccacctggcggtgactgggccagccgtcaccggaagagtctggtcacctactgcttgtgcccagctatattcgttctctcttctgggaaaagatcctaatttttcatgaaggaaccaccctccccgacaccacatgcttctggtattgccaaccctcccccactttgtctcccctggttccaagaatggtcacatgatccaccaatgacctggcccatcaacgtgtcccatgctccaagtcagtgcaatttttcaaggagaggcacctgccccaagccaggcaaactgggatccattctgggacgtaaaaaaaaaaatcatggtaaaatacatataacataaacctgagcattttaaagcacgaagttccaagattaaacacaacaaccatcccctctatccacttccaggacttttcatctttccaaacagaaacgaggtgccccttaaacaataactccctgggttagtgtctgggtgtggacataaaaaggtaccacagactgtgcggcttaaaacagcagaaatgtgataaggtgccgtcaggctgatttccttctgagctcatggctcagcaaaagtgtcttctccacgtgtcttcacatggcctgccctctgcatgggtctacgtgtccaaatctccttttattacagggacagcggtcatgagggcccaccctaaggcctcatgtcacctactctccaagggaacattgttatctccaaacacagtcccattctgaagccctgagggttaggacttcaagatacgaatatgggaggacacagttcaacccataacactccccatgccccaattctgagactttcgggaaagaacagtgctgtatctgctggggttgctgagcacatgtgatatacacctagagctatactggcggccaccttcccaagcataggtcactccagcagaggctgtctgaagacaagcggagaagagctgagagaggagagcgagccctgagcccagatgggcctgaagccagctgcacctcagacctttccatttctagttgtctgcactaaaaatttcctttttcgctttattagtgcagggtgatcagaacactaattaatgttctgatgcttgtaacccaaagagtgagtgaatgcaagggccacagtgacccttggctccaggacacgtggagtgggaccacagggcagttatttacaaggcggagtcaagactcaagtccaggttcccaggctccaaggtgccggccctcaccagttccctgggatgcccccgagtcactactgttcacagacggtggaggccggaccatagggcagctcccagggggaggcttcaggacccacctggccagagcctccctgcaggaacctgtgtttgctgcggtaaagcccagcctctccccacagactgagggctcccgtccttcagtcaataccctcaggcctgcagcgtgcctgggagaacaaagcacgaggaagtcagacaacaggctacacagcaggccttcttccctccatcacagcacacacgcagccctgtctgaataacacagggtcggaaatgacccaaacgtccttggcggggactggccaagtgcattacaggacattccaacagcatggccagattctttcctggaccaaaacaaggcagcagctatctcggatacacagacgggcacagaccacctcaaagagaaagggcaaacccatgaacaaggcagcccatgaaaaacaatgcgggataactgttgcgttattaaaaaaaaagaaggaggaggaggagttactactttaaaattagttgaaatgggccaggcatggtggctcacgcctataatcccagtactttgggaggccgaggcgggtgtatcacctgaggtcaggagttcgagaccagcctggccaacatggtgaaaccccgtctctaataaaaatacaaaaattagctgggcgtggtggcaggcatctgtagtcccagctacttgggaggctgaggcaggagaattgcttgaacctgggaggtggaggttgcagtgagccaagatcgcaccactgcactccagcctgggcaacaagaacgaaactctgtcaaattaaaataaaataaaataaaataaaataaaataaaataaaataaaaaagctgagtgtggtagctcatgcctgtagtccaacactttgggaggctgaggcaggtggatcacttgaggtcaggagttggagaccagcctggccaacatgatgaaaccccgtctctactaaaaaaacaaaaattagccaggcatggtgatgggagcctgtaatctcagctactcgggaggctgaggcaggagaatcgcttgaatacgggaggcagaggctgcagtgagctgagatcgcgccattgcactccagcctgggcaacaagagtgaaacgctatctcaaaaataaataaattaaaaaaatgaaaagtaaagtaaaataaaataagacacaggtctgccgtggcaaaaaattaccacaagccctcccagttctaggggcaagaagtccaaggtgtctgcggggcgggctcctcagggagagtccctcccacacccctccatagctctggtggctgcaggcattttggtgtttcttggctggcacacgcagcacgccaatccccactccgctgtcacctagccctctggtctgtgcgtctctgcctcaaatctctccttgcctcatttaaggacaattggcattggatgtagacacaccctaaatgctgaatgacctattctgagatccctaattacacccgcaaagaccctattttcaaaggtcacattcacaggtactgggggttaggacttggacatatcttttgagggcgacaggattcaacccactacactattttattgaggatgggtgcaaggctcaccagagccagctcagggccccccgccagtcctcctgccagcgatatccactggctggggcgagagagaagcccctgccaccacactcagcctcgcaatgggtggcacatccagaagagccgcccctcctctggccttccttatctgcctgctgcatgctaggatccaacaaaagattccgctgactccccgggctgctaggtggggagctgcggccagctataatcagacagggagccccactgcagaatgtggtctatgtctccacactccaaaagcccgagggacacgctggagagccttggagccttggagccgggaagaataggaatgagttaggacttctggtgttggagacagggcctctgttctttgtaagacaaggggctcatgggccggcctgctggggtttagtgttgatgaaggttctggtctaaggggctctcgaggtgacaggagagaaagtgcaggcatggacaggggtgtgctgaggggtctggctagggtcgtcatgctgcaccccaaggccacactgaccacacctaccaggatggcctccatcacagcctggagttcctgggacagcatcagcacggtgctgatgatcagggctccccagggagccggggagtctaccaagccttcctctcggtgggactagaggctctgaccagcccttcagtcccccatggtcttcccaagaccttcttgggggcctctttctagaggagttcaggacccctgttccctgctccccactcctgatggaaggcaggacacaggtccatctgtagtcactggctttaacttataccttctccataacctcagaaagccccccagagcccgcttcaagatgttatcatttactgataaagaccctcagtgctagtaaggggcagacccaagatgtggctccagttctgattgatccgggagctccatgccagcttgtgtcccccttctcccactctccagccatcatctgtcttggggactttcaagccttctgttagtaacccacagcaagaaacccatctcacaccatccaagtccaatctacaaatattaatagccaaaaccaaaatttcactcgggccttttttattccagacttctgtgccagctcacaatttcatgctggtggttgctggcggcaacccactaaacggatttggtgtctcacaaatggggcgtgactcccagttcaaaagacacacacaggtatgcacccagtaacactcagaaagaggggagcgaaaaagaaggactgttggcattttacacattttgcagatcatctaaaaatccatttgtggatgtgaatttttcctcccatgtaattgcaatttctgacttttttttttttttgatggagtctcgctctgtcacccaggctggagtgcaatggtgcaatctcggctcactgcaacctccacctcccaggatgaagcaattctcccacctcagcctcccaagtagctgtgactacaggcatgcgccaccatgcctggctaattttttatattttttgtagagacagggtttcaccacgttggccagactgctctcgaactcctgacctcaggtgatccacctgcctcggcctcccaaagtgctgggattacaggcgtgggccaccgcgcccggccacagtttctgacttcttgatctgtgaatggagtcattcccttgtcaaatcctctttctcgtattaaaatctcagaggtcctataaaggctagctcaagctcaaccataaaattcttctcccacctggccctcagagacggaattttcacaccatgagatatacctttgcagaaatctcggggcatctcccaaccctgggatgttttcagtgagtttggtttccggacacttggctaatggaaggaatgagagagaagacaagggacactgcgcagctcctgtcttctctggaccaataacaaaagtcacctttccctgcatgtcgagaagtctgagacacatcactcaaaagccacctttccctgcacgtcgagaagtctgagacacatcacccaaaagccacctttccctgcacatcgagaagtctgagacacatcacccaaaagagacctttccctgcacgtcgagaagtctgagacacatcacccaaaagtcacctttccctgcaggtcgagaagtctgagacacatcacccaaaagtcacctttccctgcacgtcgagaagtctgagacacatcatccaaaagtcacctttccctgcacgtcgagaagtctgagacacatcacccaaaagccacctttccctgcatgtcgagaagtctgagacacatcacccaaaagagacctttccctgcacatcgagaagtctgagacacatcacccaaaagtcacctttccctgcacgtcgagaagtctgagacacatcacccaaaagtcacctttccctgcacgtcgagaagtctgagacacatcacccaaaagtcacctttccctgcacgtcgggaagtctgagacacatcaccattttccactcatccactggtatcagacaccattctaagggagggtcattctaaccctgaaaacaccagtgttagagaccacacactgggccatggcctgtgcaaagctcccctgaggacacccaggagacctgttatgagcctggatttgagccatgtggattagaagtcaacaattcctggtttcattcacagccatcctggtctgcaccagcaaaaccaaagagagtctatgataatttgaataattcagacctcattgcctgtttccttcctctgcctccaccgcaagaaatgaaaacaagaaggctacgtccactatttatctaccttctgcacgtctgacatagagctctggttgcaatgttggtacagtggtggcaactggggttccaggctgtcacctcccatcagttcacacccctttctccatctttgaaatgggccagctgctacttccctaccatctaaatcttcaggcagctaagtcatctccgacaatgtcttagctcctccaccaataccacccagcaaaccgagtccgtttactttgctggaaaccgaccagagagcctgccagggtcaatgtgggaaagaaaggccccaggccagtgcacgaagacgacagcctgacaccccagtccaccttccggaccatgctgttctcagcaatcccaagcaaacggcggccgaacgcaggagccagaagggagctcaaccttcacttacctggggggcagacacattcggatggagcttcccgagcagtccggatcttcgctagtccgtccaacttctgagccggaaaaaaaaaaagaaaaaaaacgaggagagaatgagtttcagaacagagaggggtaaaagtggaaacatcagcaaaaacaaatgtatctaaaccatctacagtgctggggctgtctgtgagaccatctctcaaaagatccttaaactctacagggaattttagaatgaggaaaaacaaacacaaacactaaacagttactggtgagtccctgaaaaggtggcaggtttctgctttgttacagcattttcaaatagaataccaagagttacgacagaaacagcgtcctgcaagtcaaaagccacagcgaccaccagccctgcagggagggaggctggggctgagggaggcctggagagggcagatcaaagttaatgctccaggcggctttctgcactcacaaggccaccccgtccacacccgggaagtcccaaaaccccatggctgcagcccctcctagcccaccagcctgggacctgatggcccgggttgaatcaccctgatgaaaacattttcctttgttgttttctgttttccattttcctttcctcttaccagtggggatccttggcctagaaaatttggttcggtaaaatttaacaagaatccctacacatgcccagccctgtgccagatttgggtgagaggaaaagaattaccacagaacgagggtcaaaaggcacagctcccctacaatgcagggactgctctggcaggctcctggcccgatggaaccctatgggcacccctgaggccagaacaaacggtccctgccccacagatgaggaacgcaagcttggaaaaaaagaaatttgtcccacatcccaaatctaggttgagcggaatgaagcaattggcccaaatcccaaaactagccagaacttgagtcccaatgaagacacacagttttaacctttctctaggggaaaaaaaaatccccctaaaagcaaaacaaagagcacaaatctgtgctgacctaagtgaacagtgcagcgccaccatgagaaccgagggcttcctgttcaaacattaaacagtatttttaggcactgctttagaggaggagagaatttgcacagacgacaagacctcagccaggccctgtctgcctctgactggaacagcccaggaccgggagacttcaccagggcacctccagccaccggaaaggcgcttcacagttccactccacctgccatttcagcctcattttacagacgggcaacaagaggcgcagagagcgaagcagatcctaaaacagaagaagttaccacggtcaaagtgtgtctggagttggttcctgccggtgggttcgtggtctcgctgacttcaaaaaggaagccacagcgtggtggcaggcgcctataatcccagctgcttgggagactgaggctggagaactgctttaacgcgagaggcggaggttgcagtgagccgagatcgcgacaccgcactccagcctggatgccagagcgagactccatctcaaaaaaagaaaaaaaaaaaaaaaaagaatggagccgcgggccgggcacagtggctcgctcactcatactttgggacgccgaggccggcggatcacgaggtcaggagatcgagaccatcctggctaacatggtgaaacctcgcctccactaaaaatacaaaaaattagccgggcgtggtggcgggcgcctgtagtcccagcttaccccagaggctgaggcaggagaatggcgtgaaaccagcaggcggagcttgcagtgagccgagattgcgccactgcactccagcctgggcgacagagagactccgtctcaaataaaaaaagaaaaaaaaaaaaaaaaagaatggagccgcctaccttcctggtgagtgttacagctcttaaagatgacactgacacaaagagtgagcagcaaggagatttattgtgaagagcaaaagaacaaagctcccacaaggtgagggacccacgcaggttgctgccgctggctggtggtggggggggtgcgggcttttattccgttatttgtccccgcccatgtcctgctgattggtccactttacagagtgctgattggtccactttacagaatgctgattggtccattttacaaacctctagctagctacagagcgctgtttggtgcatttttacagagcactgattggtgcattttacaaacctctagctagctacagagcactgattggtgcatttttacagagcactgattggtgcattttacaaacctcttgtaagaaaagttctccaagtccccactgcacccaggaagtccagctggcttcacctctcaaaagcaataccagggcagccagagggtactccagggggtgcctttaggcgcactcactcctccatcatcactgcactccccagccctgactctgcaagtccttgacttgccctgtaaatcggaacctggctaggcctctggatgccaggcttccagcttcctgcagggactggacctgccactccctgctgctttggatggagctgcccagctgtcccacaggacccttgtgagcagcctgggccagcccccagcttccaaaggccccccgcagcctgtgagtgagagctgctccacccaggcgcagcagacaccacccctactaatccccactcccagcagggctgcctggagtggagtccatgaggggctgaggcttctgcgcagaatggagcacactggccacacctgtcccagttgaatggggggcccacgcaaaagctgcacccttgagccggacctcagaactcactttttttttttttttttttttttgagacagggtctcactctgtcatccaggctggaatgcagtggcaccatctccgctcactgcagcctcaacctctcaggctcaagcaatcctcccacttcagcctcctgagtagctgagtatacacgaaggtaccaccacacccagctaatttttaaattttttgtagagacggggtttcactatgttgcccaggctggtcccaaattcctgggctcaagcaatcctcctgccttggcctctcaaagtgtgggattacagacgttgagtcaccgcgcccagccagaactcacgcttttccccattgtattcgcagatattaaggcagatttcaaaacgtacttggagaagaaacccaacattttagtttaagccagtcaacctgtgtaagaaactctcatctgtttttatcagtgctagacaggacagaaaggacttccacactgatttcattttttaaacaaaagcatttcatgccaaaaacaattcacttttaacaactgctgtcacacttgggctactgctatcacatctgaacctctccctgaagggggagaaggattttatcaacactgataggaaacacagttacttttgagctactctcaccttaatataaaaagctaggtactgttaatgctagcggcgggatcacaggttactgggattgtgctggtcatttatcctaactccttttgtgcttttgtttctctcaattagatggtgaatctgtaaagttttctctcccggaccccacctctcccccacctccaggcccctcactttctgtatcctgactactaagaatacaaagtgaaatgtttgaattagaaacccaatctcacaatctttacttcatgctctttttttttttaatcctaagaaaatattcctttgtgtccaggtttgtaaaaatgacttaaaagcctcagcattttacattcaattatctggcagcacccccagcatctgcaaacaatatggtcctggttttacatatgcaaacaagtcctgactctaaaagtaaataaaggatgagtttctgagaaaaagaccagagactttgggcaagttcccttctagaagtactgggaaggagaacttgaagtctgggggaagggcggcaagagctcagggaatcagggaaatcctggtttttagaaaagcattcatgacatggtcagaggatacgtttattaacgatctgtcggggcactagtcttgaacacttcaccagatgtttgatcacatccttaagtggttttgttctgaggaaatacagattgacatagaaaagaaagatgcaatgatttattcctgtaaaacgctgtaaataattaagacatttctatcctttgactaaaaattcctactctggagaatatatcctaagggaataaatcagcagaagcaaaacatgatatttatgcagaagttgcaccgtaaaacagtgggaatggtttagtgaaagatgtggaatctccttgacgcaactgtcacatcaggaaataggattatgaagactgtgtagcaacaaggaaaaatgcttatgctacaataaataaaatgtctacattgacgtagaaacacaggcatgggggaacagcaactaacaaaacaacccacatgggtgttggaatgatggtgattttcttctttctgggctgttgtgatatcatcttctcagtgaaaaacaaaaaagtctggaagtagaagagacaatgtaaacccttgaaatccccccgctgagggcaatttcggagcgacagactctgtctcctcagggaggcccagctccagggtccatcctgtgagtacaggcacaccacaaacaccagaggaagggcttgtcgagaaccaaatgctgaccacaggcacagcttctctgctccccttctacctgcttacgaagagacagttcaagccttctcaccaccaccagcaacccgaggagactccttttcctgacccctttaaacgttctcttttgataccccaccacgatgatgatgataacaaatacaactgaagtattattatcaagactggattacatattatgggccagacactgcgccaattgctattatcttatctattcctcctgataacccccacgcggctgggattcttattacacccatttacagatgggaaaattgagacagaaagagaagtgtcagggctggacttaaatcctggtagcaactgacatggatcatagatgacaacctctgctctcaagtaatgttcctatctacaaacattctttaaagctatcagggccgggcgcggtggctcacacctgtaatcccagcactttgggaggccgaggcaggcagatcacctgaggtcaggagttcgtgactagcctggccaaaatggtgaaaccccatctctactaaaaaaaatacaaaaaaaaaaaaaaaaattagccgggcgtagtggcacacatctgtagtcccagatactcaagaggctgaggcaggagaatcacttgaacccggaaggcagaggttgcagtgagtgagagcatgtcattgcactccagcctgggcaacaagagcaagactccatcccaaaaaataaattaaaaataacaataaagttgctatcagaagccaagccatacataactcagatagaaaccagtacagtgtctgcaaaagggtgggagagtgacaggaattaactacaagggcagcatggaggagattaagggtgacagaactgttctgtgtggtcctgggatgatggacccatgattatgcatttgtcaaaaaccacagcactgtccatcccaaagagtgacctgtaatgaataccaattacaaaccaaaagtcaggatgctggagaaacccaggctagaataacaaatctaactatactaaagttgtatggcataacctcactgaaggttggggaaaagtgtagctcacctaagtaacgttgcaaaatggtgttttcattgaaaactctaaggctggccaggtgtggtggctcgcgcctgtaatcccagcactttgggaggcagaggcgggaggatcacctgaggtcaggagttcgagaccagcctggccaacatgatgaaatcccctctctactaaaaatataaaaattagcctgatatggtggcgtgcacctgcaatcccagctacttgggaggctgaggcaggagaatcacttgaacccgggaggcgaaggttgcagtgagccaagatcgtgccactgcactccagcctgggcgacagagtgagactctgtctcaaaaaaaaaagaaagaaagaaaagaaaactctaaggctgaagacaaaaggaatctgatgtaaacactgtactctagctaggcggtaaagatgtttctcacagggattcaggttagcaattttgaaactactttatatacacattagggttgaacagataagtaaacaaattatgagtaatgagagccaggtttctcactgtccaagaaagaagttacaaataagcaaaggaggaaagctacagtgaaccctgtggtgctgaatcagtatcgaagacataaccatgaggtcatgttcatgttctgtacacagatagatacatacagaaatcatcacagatatgtgcatatagaggagtcaatatacatgtttctacacctccctctgtctgcagagaagttctacaaacagtcataccctagtagtaacaagcacacacagtacccagatcttggtctctaatatcattctccaataaaaggaaccagggcttcttggagagatgagaaatgagaaattctagggccaaggcagaaaaaacacaagatgagcctggagtcttacagtgcccgaaagtaaggaagtgctttacaaaggggttggggtcaggggcactcgtcaaagaaacataagaaccaacctgaaaggctgggtgtggtggttcacgcctgtaatcccagcaatttgggacaccaggacgggcagattacttgaggtcaggagttcaacaccagcctggctaacatggtgaaaccctgtctctattaaaaatacaaaaattagccaggcatgttggatcaggcctgtaatcccagctacttgagaagctgaggcacaaactgggagacggaggttgcagtgagcagagattgtgccactgcactccagcctgaaaaccaacctgaaagagcttagaatggccaaagctggaacaatttaagcaacaaaataaataatgttgtgtggtcttataacgcaaagaataaattaaatatccttgagtctacagtgatataaatgattgaataaataaatggagagaagagataaaacttccttacagaattccaaataatatatgtaaatacttccctcttcccggaggtgaagctaacttcccctccccttgatatgggctagacttaaacaataactttataatggagaaatctggcagatttcccttccctcaaccaagtgatcaaggttcatgtcacaggaatacctcatgctggccccatgggcccccgatgggatgccatgaacatggcaatccacctcagtggtattctttccaaatgctcctcatgagaagtattagactatcccaaattgtgagacattctataaaatacctgcttaatatgtctcaaaactgtcaaggccatgcaaagcaagggaagactgagaaatggtcatagattggaagagactaagaagacagcacaatcaaatgcaacgtgtgtcctagatggaccgtggaataggaaaaggacattagagagaagaaatgggtgaaatctaaggtgtaatttagttttaaaaaaaaaaagcataatcacaaagtcacttaccaccaaataagatatagccttgttattttttagaatggatttatttttttaactgaggtgaaattcacataatcattaacataaaattaaccattttaaagtgaacaattcagtggcattaagtacattcataatgttatacaatcaccccctctattttcaaaacactgtcatcaccccaaaaggaactcctgtatcctttcctccctaaccccagctcctgcaaccaccagtctgctttgtttctgtgggatttatctattctgtatatttcacataagcagaatcaacaccacttgtgatttccttgccctttgtctggttcctttcactcagcatgatgtgtttgagactcatgcacattggcgtggatcattcattcctttttatgactgaataatattgcatggtgtctacactaccatttgctcatccattcactgatgaacatctgggcactttccaccttttggctgttgtgtacggcgctgctgtgaacatgagtctacttttatttgagtatctgttttcaattctttggggtataaacctgggagtggaattgctgggtcatatggtaatttcacatttaattttttgaggatcccaccaaactcttttccacagtggctgagtcattttacactgccaccagcaacgtatgacagttccaatttctccacatttttgccaaaagatcctggtggatgtgaaatggtatatcattgtgggtttgatttacatttccctaatgacaaatgatgtcgagatacttttcgtgtgtttgttgctcatctgtatatcctgtttgaagaaatgtctgtgcaagtcctttgcccatgttaaaattgggttgtgtgtagttttgttgttgaactgtaggagctctttatagaatctgtatactagaccctaatcagatataggatttgtgaatattttctcacgtaaattcttgatcaggattctaaccacctccaaccaagacgcaatatgagcgtgttaacatcatcttgaacgttggtggaagttttccaatggtttcgtgctggtcttcacattagtccttactgagatcttgctacattaaaagtgggatattgttactaatatatttgatctgatcctctttagttaacagtaattgtattcgttttctattgctgtataacaaatgccacaaagttagcagtttaaatacacactgactatatcacagtttgtgtggtcagaggctgggcataactgcagttggtctctgctcaggttctcgaggctgaaatcaatgagtcagctgggggtttcttcctggagctctgagtcttctctcaagttcatgtggttcctcctggtttagcaggaaggcctcattctcttgctggctgttggctgggtactctcagttcccagaggcagctcacagttccctgccacacagcccctccacaccccttcatgctgcacatccctgacttcaggagggtcctcatcccttccaagggctcacttggttaagtcagggccactgaataatctcctttttcactaactcaaagtcaagtgattccttcgtaactcaatcataggaagatagcccatcataccctctccatactggagaggagggaattgtataaagcatgttccctagggagcgggaatgttggagaccatcttagaactctgcctgtcagagtatcacagttcatttctttttctttttctttttttttttttcctttgaaacagggtcttgctctgtcacccaggctggagtgtagtggtaccatcatggctcactacagcctcgacctcctgggctcaagtcatcctcccacctcagcctcccaagtagttgggactacaggtgccgccaagtcaggctaatttttctatcttttgtagagactgggtttcatcatgttgcccaaaatgatctcaaactcctgagctcaagtgatctgtgcctgcctcggcctcccgaagtgctgggattataggtgtgagccactgtgcctggcctaatttcttacttttgaccaatgtactgtggttatgtacatatgtacactatgtacatatgtttttctacattagtacattagtttttctacaaacctaaaatcatccccacattttaaaaagaccagatcatgaatttacacttataggcaacatagagtgacaatgactagatttgccattctgcctaaacaacatcaacaacaaaagccacaaatgtattcctgcatataaaacaataattttgaagatgctagggacaggcaggcaaggacagtgatctttgagacaggcaacaactgctctagcttcccacctggggagtggccaggctgagcacatggaggggggacgcgggtggtgcctggcagcctcccgaattgaagacatggagctgagagccaagggaggccgaggcagtcagagtgtgcggaacagaggactggagagatgaaagccaccaagatctgctgaggatccccttcgagtaggaggcagagggcctaatcagcccctgcaggcaaggaaatgactgaggtcagggaacgaaccaccgaaaaggattctagggcaccgcagacagcattcacactggggccgggagaatgcccgatcccaccagccaggccagtaaacctcataatccaccatgagaaagtactgaggagaggcatggcactgtggttcacacctgtaatcccagcactttgggaggccgaggcaggaggatcacctgagatcaggagttcgagaccagcctggccaacatgatgacacccagtgtctactaaaaatacaaaaattagccgggcatagtggcaggtgcctgtaatcccagctacttgggaggctgaggcaggagaatcgcttgaacccgggagacagaggttgcagtgagccaagatcgcaccactgcactccagcctgggtgacagagtgatcaaagtgagactcagtctcaataaataaataaataaaaaataaaatacttaggggagcaccaggaagggccctgccttgctagtagggaagaattaaccctagggcctaggtgaaacactgctctagtcccacctaatggatcccaacaagaccctaaaggaccaaactatttccagcccaggaatatatatacaaatgcaaaaatattcagcatctcatgaggtaaaagtcatcatgtctggcagaagaataagaagttaccagcaggaaaataggccctatgatgaacaaaaaaattaattaattgaaactggcccacaactgccacagaggttggaattagcacacaaagacattaaagcaattattataaccgtactgcctatgtgcagaaagctcagcagagacaacaaagtattgaaaagacctaaactgggctggccacagtggctcacgcctgtaatcccaacactttgggaggccgaggcgggcggatcacaaggtcaggagattgagaccatcctggctaacacggtgaaaccccgtctctactaaaaatacaaaaactagctgggtgtggtggcgggcgcctgtagtcccagctactcgggaggctgaggcaggagaatggcgtgaacctgagaggcggagcttgcaatgagccgagattgcgccactgcactccagcctgggtgacagagcgagactctttctcaaaacaaaaaaaaaaaagacctaaactgaaattccagagatgaaaactaccaggtctgagatgaaaaatatgatggaagggattaatggcagatgagacattgccaaagaaaagattataaactagaagacagcaatggaaactacctaaaatgaacacacagagaattatttttaaaaggaaaagacaaagaagacaactagtgaactgtgggacttcaagtggtcaaaatatgtgtaattggagtcaccaaatgaggagtgagaaagagcaaaatagaaaaaaaaattttgaagaatagtcaaaaagtgttttcaaatttggtgaaaattataaatccacagatctaagaatcacaatgaaacccaagcacacacaaaaaaaaatcaagaaaacgacaccaagatatatcataatcagattgcttaaaaccagcaataaagagaaaatcttaaaagcagtcagagaaaaatgacatatacatgagcaactggaattgtcctacactgctggtgggaatctgaaatgatgcgatggccttcagcaacagtttcttaaaaagttaataatacacatatcatatgctcagccattccactccaaggtatttacatccaagagaaatgaaagaataaatccgtacagggactggcacgtgaatacccatagcagctttatttacaatagacaaaaactggaaacaatccaaacttccatcaatagctgaatggataaacaaattgtggtatatccatatagtgaagtaatactcggtaatgaaaaagaatgaattaactattgtgcaaaagcagttctttgtataagcactacataaacatactaaagtatctctcaataactacactgagtgaaagaaaccagacgaacaaagagtgtgttattccacccagagaaaaatcctggaaaatgaacagaaatcaatagtaacaaaatcagtggcacgttggtggcaggcagggagggatggaagggagggaactgaacgaggcaggaggaaactctggagggtgagggatgcattccctatctagactgtggagagggtttcatagttgtgcacagatgtcaaaatttattaagttgtgcatttttaatttgtggagttcactgtatgtcaattatacttcaaaaaaaaaggcaaacaacaaaaatcccaggctgcggcttctacagacttggtgggtggtagagtgtgtgtcctgggtacagaaggcatcacactgagcctcaggttctgcctgggttcggtgacaggtaaagcacccagcagagtcatggcaaaggccaattgtgagagcgtctggcccggccaccgcacttggcaggagccacttggcttttctctaagaatgtgggtttaatcagtgactcccattggcacactgagtgactctctttcaaaccacgtcagcaaacgcatttcctcaagggtccctgataggtcctgaaatacattaacatgttttgaaagggttggtctacaaacaaatgggattcctcagtaatccttcattcacattcacattcattattttttaaaattatttttgtagaaaatattcacagcagttttattaataataacccaatactggaaacaactcaaatgctcattaacaggagaatgaatagtgatatagtcatacaatgaaatactactctataatacaaagagttattgatacgtgcaaatacatgaataaatctcaaaagcactattttaagcaaaggaaccacacataaaagaagacataccataccatagggttctttttttttttctttgttgagacagagtctcgctctgtcacccaggctggagtacagtgatgcaatctccactcactgcaaattcagcctcccaggttcaagcgattctcctgcctcagcctcctgagtagctgggggtacaggcgcccaccatcacgcccgcctaatttttgtatttttagtagagacagggtttcaccatgttgaccaggctactcttgaactcctgacctcaagtgatccacccacctcagcctcccaaagtgctgggattccaggcatgagccaccgcacctggacctgagggttctatttatatgaggttctagaacaggcaaaactgagctattggtgatagaaagcaagaaggcggttacctctgggtggagacaagaaaggggcatagggaattttctgagatgttaaaaatattctgtacttattggagatgctggtcatgggcgcatatatttgtcaacatccatctaactctacacttaaaatctgtgattttattgtgtgtaaattatatcctttcttttttaagagttagaacaaaagaaaaaaagtaagttgcaggatgtggagggaaattctcagtggaatcccacaaggaaaccgtgccagcccctccatttgtccaagcattctactcgccacggggttggatgctacacagacgccaatgaaaaggttgctcccgggaaatgtttggaagccgcttaatgctccttgcagggagacattcagataacatacattgtttccccacaaatatacacactgtgagagagaagcttactccaaaagggtggctcaaaaatacagcattctgtttcttgcggcaaccggtttgcagtgtcaagaaacgtaagacaatctatgttgtctttcccacttcatgaatgctaaacgctgaaggtattcagcttagcatctccgagttggagagaatgaggacaccatccacctgacttctcttcaaaccagagtcccttctccagcactcctgctcaataggaatccaggcacttacctgatttggcatgtgagatcagtacttccagcccattcttttgggacaactcttcatttgctttcaagttcttagcagtcattaactagcaatcttcatcctggtatcttttatgtgtcagtcgctttttccttcagaagaaggaaaggacagctccgcacagctccccacctgtactcttagggtcaaggggagccaggctgttcatttggtccatcctttttcaacaccacttcttgccttatgagtgctgcagaaatatcctctaatgaaaagaaaagtgtcctcctttaggaaacaggaacctccaggtcttaactactatcctgggaatgaagtcagccacaaaactaagggataattgggcagttaggaagcacctcttaacctcaaaataatacaacccttcctaaggctgtctttccaccactacagcttcgctcgtgtagggaatgaaggagtggcccctcttcaaagaccccctttgaaaatgcagcatttcccaaggaaagccacacattcagctgcttattaacagcaacatgtttttcgtgttaatttgccgttcacaacacactcctatgtgttacctccttaggccctcactaggagctcctgcagaagatcatggattatcattatttccacctatctttttggaagataaatctcaagcagttccatggctcacctagaccacctagatgggcagtggcaaagctggaactaaaaagcaagtcttcccacagcaggtcctgtgctcttcccatagacaaggcacctgccacctggtcctcactattcaggagactgattgctgtgagagcagaaacagaacgcaggacagttcctgggaaaggcaagaagagtgcatgagccattgtgttgggggtgaggagaaggggcgcaggacaggaaggaagcggagaccaggtccaccttcacttgctccgagttttgccaggcatatgtgtcctcagagaaactcacatacaccaggtgttcggaatatgaccgtagccacaactacttcacaatcttccaagcgagcaagtcaatccattgattcctctagtagcgatggataaaaacccaactcaaattggcctggacagtgatgtcgagaggggctcggtcacgaagccgcagtgcttttggcagtccctcaataccccttcagactgtgtttctccttgcgcagcaagtcgatgctgggagctccaacttacagccgttgggggtgattttgcgaaggtagttttttcaagcaaagttcagttccctaaagcatactggctgaaaaagtcttgccctgctgcccaatagcccactggcgttgccattcattatcctttttttttagacggagtctcactcttgtcgccccaggctggagtccagtggcatgatgttagctcactgcaacctccgcctcccgggttcaaccgattctcctgcctcaccctcccaagtagctgggactacaggcgccccccaccacgcctgatttttgtatttttagtagagacggggtttcgccatactggcgaggctggtctcgaactcctgacctcgtgatccacccgcctcggcctcccaaagtgctgggattacgggcgtgagccacccaccgagcccgtcctcattatttttcaaagacacacacggcttctcagaacccgccctccagggttcaccatgctgggctggcgcagagacccatccaggcggtaggagcggggacaggcgcggggtcgtggagggccccgggctgttcctgatcctcgaactctctcctccccacggccgcggtctcctccccgggccccgcgcgccaggccctgcgaaaagccccaacgggtcccccggcgaccgccgcgccggcctctcggtcctgtcctccgaggcgccaggcctccgcctccagcgcgggcctctcgggcagcgccgcccctccccctgcgcgcacgggaggccgcctgggttcggctttggaccaggcgagcagcgcggcgctggccgctctgccgggtcagccccgcggagacgtcttccccgctgcgccccggccccagcgcagcgcccggggagcggcccctcctcgggcagcggccggcgcctgtgtccctagcgcggtactgcttctgcctgaggactccccgccggggtcctccctgtcgccgtctgcgcctccgcgccctgtgggccgaggccccggcgctcctcgctcagcccaactcccaaggcccagcgggtccctgctctgccgtccggggatcccgcgggtggtccggagcccggggcgcggcgcgccgttcattcccgcgtcctggcggggcctgcttcttcccgagccctctccctgcggctggtggtcccagcgtgctggccgcgtctcccctcttctcgggacaccagccctgttggatcagggcccccccacaacgacctgtgccacctcatccgcctctttaaagaccccatccccaagggcggccgcatccggaggcccaggggtgaggacttcgccacgggaaggaggcacacgattcagcccatgacaccgccacctcggcgtggtgctgtagggggaagctcaggcactcaccgaggacaggacccggggaatccgctggggctttcagcagggcctggcgcgcggggcctggggaggagacctggggaacagcccagggccctcccagaacccgcgcctgccccccgctgcctggatggggtctctgtaccagcccagaccagagcgagtgtcaagggggctcctctggccgcgctgcgcccccgcggggcagccccagaagggccattgctcagtcctcaccaagaccagcgaggcggattcggccagcccctttccagaagaggaagccgaggttcggaaaggtcaaccaacttgtcccaggacgctggccggttcagaggcagctctggactcagacccaggcttcccaattctaaagcccactgcatgagccgtcagggcccagctacagggtctttcggggacacttggacgggataacttccacagtgaggcgataaggtcaggctggtcccatctggggaccttataaagtctctcactgtctaagtgagatgcctgtacagtgcccacacagcatgcacacacgtgcatgcacacacccacatgcacacacacactcatgcacacacacatgcatgcacacgcccacatgcacacattcatgcacacacacacatgcatgcacacacatgcacacacaggcatacttacgtgcatatgcatacatgaaacacgtgcacacatacacccatgtacacacacatatgcacacatgcatactcctggcacacacgtgcacacacacccatgtacacacacatgcatgcattctcctggcacacacatacacacttccaccctcacactagctcacgctcacacacactcgagtccccttgacatcatgggaatcttcccttcctgactgcaccacaagcctggtctgaaaggaggctgcaggaggtaatataaccgcccaagccccacgcaaaaaggcgcagttaaagcacagtcaaatcaatgagcagatccggcattttttgtgtgatgttcctcccgggaggcccaaagttgagtagattttatttaaactgtcttttcaaatacattctaattgctttatgccttgtttcacagctcagagttggaaacaaattccattttagaagttgccattacccatttgcaagcaccgccttcccccacccacccctgccccccaaaaattccgtggctacatcaggagaatagattttctcatttcccagtgtgaagcgaagcagatgtgtgtgaagcctctagctcaccaggttaaccacgagcatttcgccgtgttgccgccataccgcatgattataaaagcagactttttttttttgagacagaggactctcttaattaaagcaaattgattaggtatttgtgtgccctttcacaatgacaaatccatacaattattttcatgaataattttatttttattttggtcatgactttttaaaattaatggaaagtctcagtctgctcaaatgataaaccaaaaaatggggtcatgaagcaaattcagtctttgcatttcttcaacaaccaactcacatttctctgctccttgactcagaggctggacatgtgctaacagcttttttgcttctgtatatccttaataggatggcagaatcccggtgttaaaagaatcttaaagtcagccgtgtcaccatgggacctcgattagcaaacagatgtagacattccttccaaattcagtcaaagaaaaaactctaataccagcagccatgttcagggtgtgcacgacatgctgagcgcttgggatacatccccttgtttaattctcacagaaactttgtgagacaagtactataatccctgtttaacagatgggcaaactgaggtttggaaaaacactcatttaccggaggtcacacagctggaaaatagcagtgctgggatgtgaacctgggtgtcctcaaggctgaagtctttgtttgtttgttttgagacggagtcttgctctgtcgcccaggatagagtgtggtggcgagatctcggctcactacaacctctgcctcccgggttcaagagattctcctgcctcagcttcccgagtagctcggattacagacacccactaccgcgcacggctgatttttgtacttttaggagagacggggtttcaccatgtttgccaggctggtctcgaactcttgaccttgtgatccacctgcctcagactcccaaagtgctgggattacaggcatgagccaccgcgtctggccaaggctgaagtcttccctgccactccacgcatccatcacttacagatgtctacaaggatgtccacactcgcagaaaaagctgctgctcaaagccaaatcattgtttccaccaggtctgccatgaggctgtggaaagggctagggattaggagtgaggttactgggtcacctaggttcaggtgcccattgccaccaggggccaatcgctgcccctctctgggaggctggatcccatcttacccacgatagagcagctgtagagagaggaggctgttgagaaactagaggacatgaggccgggcatggtggctcacacctgtaatcccagcactttgggaggccaaggcgggtggatcacttgagatcaggagttagagaacagtctggccaacatggtgaaactccatctctactaaaaatacaaaacttagccgggtgtgatggcgcatgcctgtaatcccagctactccagaggctgaggcagtagaatcacttgaacctgagaggcagaggctgcagtgagccgagatcgtgccattgcactccagcctgggcaacagactgagactccatctcaaaaaaaaaaaaaagaaagaaagaaactagaggacatgtgaatcctctgcccaggacacacatgggacgcacacagttgtttctcctatagcctctagaagtacgccgacacgtgactttcagaggacatctgcaagcttttttttttttccccaatggttcgtgcttagtcctgaaatatgtttctggacatgatgaagggatgttctctgcgtgcctatgtcaacagttaaagattaatcctgattcaacacatgatgaaaactgcataagggagaaagctggaggtggtgtgtggcctctggagaatcttcccaaactgaattacattcgttcacataacgacaaatcacagtgaggaccaagcacggtgcctggcaccactaaatgctgctcaagaaaggtttctggccgggtgtggttggctcatgcctgtaatctcaacactttggaaggccaaggtgggagggctgcttgagtccagcagtgaaagaccagcctggtcaacacagcaagacaataactttacaaattagccagctgtggtggtgctcacctgtagtcccagatactcgggaggctgaggcggaaggatcacctgagtccaggagcggaggctgcagtgagctgtcatcacaccactgcacacctgcctgggtgacagagcgagactctatctcaaaaagaaataaagtttccacaccaaactgatacaggggtttcattctgaaatgaaactttcaaacttaaaggctttctttgttatcaattgctttttgctttcgacaacaatgataaatccaactgaaattaaaaattcaactaaaagatatattgaatccacgttgcccattataaaacttgaagcacaatttcataatggtcccacagcttccgaataccacaggaggagaaacctgtctgtctcaaactcagatgttctaaaattaaaacgaggctgagcgtggtggctcatgcctgtaatcccagcactttgggaggccaaggcaggcaaatcacctgaggtcaggagttcaagaccatcctggccaacatggtgaaactccaactctactaaaaatacaaaaattagccaggcatggtggcacacacctgtaatcccagctactcgggaggctgaggcaggagaatcgcttgaacccgggagacagaggttgcagtgagccaagatcatgccactgcactccagcctgggcgacagagtgagattccgtctcaaaaaaaaaaaaaaaaattaaaacgaaaaacaaagcccgaaagacatccttctgtatccagttactccacatcccaaagaataacagaagaaagaaactttcccctcaaaaccactgactgtaccattatctgcactaacaaaaatagggggagggtgtatgccacgttgatagtaggatgcagattttcttgatgggatatgcaagattttcttgatgggatatacggtacagtcatcacacatgaccctaaagatgagccatcacctggaaaaatgtgtctgatgtacagtttaaaagcaaggtaaaaatggtatgcattctgtggttaaaattaggtaagcaaatatctgtctacatgatggatgagaaaggattgcgcagaaagttaaacagcccttggtttaggatggtaagattatagggtaacattcatcatgctaaatcaagacatagcttggttatttaaaaaagaaaaaagtgcggggcagggggaacaggtgcagtagcttagatctgtaatcccagcattttgggaggctgaggcaggaagactgtttgaggccaggagttcaagactgcagtgagctatgatcacacgactgcactccagcctgggagacaggacgagactctatctcaaaaaaaaaaaaaaaaaaaaaaaaaaggaagggagagaaggatgggcaagccattatgccatttcccgacctgagagtctaggtaaaggaggcagccacagctcagcggcagcaggagctggagcgctaatgggcacgtcaaggggcaagaatgcgatgtgcagctgcctggaggagggcactgtgaaggatctccacctccccaacacccgccactgccccagggagggactcagaattatttcgagagaagggagcaacgtagaaatctgtggggcagagagggctcctctgaaggtgcaggatcacatccacacttcgcgaggtcctgaaagcagaggacagcggggcacagggctcacagcgcacccctggctgcgccagccccacctcacagccagaactgaggctcagagaggcccccaggctcctcatctagagccttcccctccagccctcagcattttcctcttccagactccgccctccaaaagcaccaagcaaggcgtgactacccccaggctacatgcacctcaccattccaggtcccgaggacttggggtactccccagactccccaaccaggccagagacatcctctgagaacactccccgtgagaacattccccaggaagctgatgaaagtgggcagagaaacagggacctgggagtaggtggcctgacctgggcacacccgcactgtcccagactgagtgccaaacccacacacagggttcgcagacattcgtccctttcactcccttcttcccaggcaggctgcaaacctaagggagctcaggcctggccctgcgtgctcttccgcctctgtgacatttctccccctgtaaaacaatgtcagtaacctctgtctgtacatctcatgaggctgttgtgggcaacttttaggatttgaagtaacttgtaaagctgacattttgtaagcacagtatatacagagaaacacagatttcgacactgctaccgataaacccaaatttatcaatgtacataaacccctagagaacaagcacccactggcctccccactggatcaaaaatcctttcattgagtttcatgccactgaggtggaatttctctagaacacagctccagcttagagcccaagcttctcaccctattccttggatggtcacctactggttttgccggcctcatgtcctctcccttttcttccaataacaccactccaaattgtcctttgggatcagctttcacttcttggtccctagagctccagtggggttgatcgtgcacacacatgaacacacacacacagacgcagctgagcctcgcccatcgagaggctgccctgcgggtctcagtgaccaggacgggtaatccgtattgttagatgcaggctgtctgtactgataaatgcaggcaatccacactggtccatcagagggaattagggaatttctgctgggactgttggaaaacagaaactaacactaaggatgtgaatctggagttgctggaagcttccctggcactttatggggagagtgagggcatccttgagaaatatggagccaagaggaagaaacaaaatccaggcaccttgagccgggcctacacagacactagcctggacttctccgttactcaagctaattaataaccccctgctttctccccaatttttatttgttgttgaaacagcctcagtctgtcacccaggctggagtgcagtggcgcaatcatggctcactgcaaccttaaacacctgggctcgagcaatcctcacacctcagtgtctcgaggagctggtctacaggcttgcgccaccatgcccagctgattattattttttttgagatgtactcacccaggctagagtacagtgccatgatcttggcccactgcaacctccgcctgccggattcaagtgattctcgtgcctcccaagtagctgggattacaggcacatgtcaccatgcctggctaaatttggtgtttttagtagagacagggtttcgccatgttgtccaggctggtctcgaactcctgacctcaggtgatccacccacttcggcctcccaaagtgctgggattacaggtgtgagccactgcacctggccacacacacacacacacacacacacacacacacacctagaaataaatacatataaatttttttcttttttttaaatagagacgaggtcttgctatatcatccaaactggtcttgaactcctgggctcaagttatgcacccaccttggtcccccaaagcactgagattataggtgtgaaccaccacgccccagcctgaattctttgaaattaagctgcaccatcttggagtcatgtcacattgctatttgagggtaaaaggatccaaaggcatctagaaaggttgaagctaatgggttgctgctcggtgagggaaggagggacagcctgctctggagaccatgactgtaactgcacctgctctggaaggggatttggaggccacagtcagatatggctgctaagaaagccaaggagctgggggaaaggcaggatagtagggggtaacagagcttcccagacacaccgagtgggtgcaggtgcactgtatgtggtctctggtagactgactaccttggtccttcggggctggggagtggctggtcacctccagcctagtgtcctcttcccttcctgcagtgagggaagtgctaccattctttgcatgtgctatgatatgggaaagctggcaagcaatgtcctagagtgccacccttagtcactcacttcgggggcagaacagcatctgctcaagggttaaaggccaaagactgcaaccaacgggactgtgccagagacaatcccaaacccatcaaccttcccttcagctgtggccggcagcacagctggacagcagagccccaggggaggcagaaattttgtggttgaagaatgttcccaaaatgtggtccttgggaaacaccaaagcagaaggaaggcccagttatgagaacttaggcgggccagtggatgactgaacccccgctctgccccaccctcctctggggtgacaacagaaacattccatggccccagcagacactggggtaacactccacggctgaccctggggtaacacttgtggccccggctgacgctcaggtaacactctatggccccagctgactctagggtaacactccgcggccctgactgatgtgtgggtaacactccacagccctggttgacactggggtaacactccacgtccctggttgatgctgggggtaacactccacagccctggatgacgctggagtaacactccacgtccctggatgacgctggagtaacactccacagccctggttgatgctgggggtaacactccacagccctggatggcgctggggtaacactccacagccctggatggcgctggggtaacactccacagccctggatggcgctggggtaacactccacagccctggatggcgctggggtaatgccctacagccctggatggcgctggggtaacactccacagccctggctgaccctgttggttgctccccagtagccatgcccagtcttccttcctaccaaagcctcgattctgttccagcggcaacacgcccagcctcaggggatgagtcaagattggccaaagcctcctatggcgatcgcattacccttgccagtgaaggggatggcgaccctgtgacctagctctggctagtggctgtaagtctgccgaaaggtgggaaagttttcccctgaattgaaattaaagagacaacctctcaagaagaccgctctcttccctgcccccttcccttctacccaggctactcttgggtgaagacataggttcacagctgcagcagccaccttgtgaccatgaggaaaggacaagagaacggcagagactgagtggtactcaggtgtggccaagtcgctgacagacccaggatgcgctgaccgtcttccaagcttctcctgtagtgtgtgctaagaaaggacactcagatattctgttacttcccatcaaaagcatatttaccatcctgtacttttcctgtctgttatcatatttgcatacatgggagctgtgaccacactatcagaggagaggcagtggaagaggttggatgacagagctggtaaatggtgggaccaggcctcaaactctcttctgctgataggaaacctcaggcatggtctgctctgctctgcctctggtataaattcattcagcttacagattccccaacctcaggggccatgcctcaaattttcaaagccgatgtggaaaagtccaatccaaaatgacaaaatatgtctgtgaaaggaacgccccaatccttggctcattctaaacatgctactattattataaagctctcccaaactgttgcaaggaaaaaaaaaaaaggacaagaaaagagtggagagagaaagtgaacatgccaagaagtcattgaaaggaaacttttttttgttgttttgggagccaggaaatgtcaaggaaacaaatgtagctatgatttacactgcatctccagttgtgccatggaattcaaaaataggcatcttaattaaaactgacagcagagagcagccctgacaagtagacaaaccaccaaagaggctgaaaaatctccatttgactctgggttgacagtatttaaccaatatacagagttgataagagaaaaggaaaatgcgtaaactttactcgagtctctgggcttttcttgttttcaaactgattggtctggacaatggaaggccaacagccaacaataaatccattgtaagctggcatggtctcctctgaatacaactaaatatttctttaatccttgcattacattttttactgtattatgaaagccatgtattctaaagttttaagcttttataacattgtaactataggtataagatggggggattgattacttaggcaacctatttaaagcactttaagaggaaaatattagatttttttgcatgaatattttcacatcatagtgaagatacgatcgttcatggctcttactcagaaatcttgtttatctcttcctttgtgtgccatgggaagggtctttaatgatcatgagttgacatgaatattcctttcttgtagcttctgtatcttcattatcgggcacatcagccggtcccagaaaaagttatttcacagttctgttcccaagggaacaaagagagtgggtcccatattcacagtggcttttgttggcttctttccccctgacattaaagccatgtatggttggcaaggatgtcttttctttaatgtggacatggtttctgcctctggttctctggaaacaagtttgctgtaggacaagctgcccgcacactcacatacacggaaaagaggcttcactgagaacaaatcagaactgaaaaacagcttcaagtacaaatgttcttttcttccgagattttgagttcaatatttatttggctttcatatctaatggcttgaaaaagtatctatacatctaattagagttaattactcactccctgtatgtgcctcccacagtgctctcctcccagccaaggaactcattgttaccggccaggctgtgtacatttcccatccagtgacatttacaagaagaatagctcctagcagaaacaggctggtaccctaagagagagaagctgtctcacaggggccacccaaacaaccagaagttcagccccaactgcattcatactgcaccatctctgactctccactggcgggaaaacccagccagcttacactccacgcacagcatgcgcctcagatacccagctgggattagcgagcaggaccacgtgtgaatggcacggcaaattctccagaatacagggttccctggattctaaatttttctcttgcctttctaatcaagaacagagagagagagagaacacacaccctgtccaataactcattgttcaagcactgtagttcacccaggtaaaattcagtgcagccgggaggggggaagcctgggagagcaactgcagtctctcccgctgaagttcaggactcaaaaatcaacacttcccagcagtggctgcctgcccaggatgcccctccctcctaaaatagacacaatttgtagttccttgtaaaatggttgtatcaggacttctgatttactcaatcagggcttgcggtttatttttagcaaataagagaggcctcctatgagaaagagcagccacacttatagcgctaacaggtagaaactttactggccctctataaatcaattcaacaccctggtctccaggcatttgccaaaagctaatgggcggcaattatgaaaccatcgccaggagtttccagcagggctgagagagagttttaagtctgcaggccctttcaagggtaaaataggaaatcatttcatgaagcagcaattttacccagaacccagctagaagagatgtgatcctagcttaaattaaagtgactaagaaacaggtggggtgaacaaggaggtgtggtacgcaagtcatcttctcccactttcctttggaatccaaaggaactcaacattggaaacacagctggatacgttaataaagatcccagctgggcagtctagggaattgggggtgtacaggccagtgctccctctcctccaccttgaaaccctgcctgttttcacacagcaattgaggatgcgcccttggacagcgaccttggggtctggagcagccatctatcccaggagaaggaggaaggctcggcaggggaggctctggccagcccaccagggcctgtccagtttcgtggggaggggaactgccgcacatgccgcacacaaaaggcggaggctttgaccaacatgctgggtgagggcttggaggacccaaaggtggctctttctttgaagacacacagcagcaatcttaacccttagaagtgtcacagagcctcatatgagctttcaagtaagctgtggaagtcgcgattcccaggtaagggacgggaaactccggatgtcctgcgagcccacaccccagatggcaccgcctgaaaccagaatccaggtcctccacccccgattgtttctccttcctctcatcttaccaagtcatgtgggcgcccccacccccatccccgaggcctcagtgcgacggtgaccgctcagtcttggggcctgagctgctggagacacactggagcacagcggggcccagccctcgggcctgtctgaggctttcctccgccgtgaccaccgcctctccaggtgtaccagcgttggttaggaacagtaggtgctactggtcacagtcaccagatacttcccacgagcctcatctttatccccgactctggccgccggcgggaagcggcgtgtccgagcgcacaccccgtggagactgaccctaggtctgttactccaaagtccctggtctctccttcccctttctcgcggccgcctgcctggcacgggaccctgaggccggagcggagaccgcaaaaccccttggggccggcaccccctgcctccgccttggcgcagacgtgcccatctctgggacggccccgagcgcacgcagccggcgggcgaccctcctcccagagacctgcacgctgcccccggctcccagcgtaccgccaccctcaacccgacacacccaagtccgccccagccacgcgccaagacgctcacctcccgcagcaggcgctccaggtgcggctcggcccaggcgtccagggcgcctggcggccccgcgcgccgcagcagctcccgctcctcctcgagcgccgccacccggccctgcagcgcggccgcctggacacccagcagcaggcaggcagccgccgagcccacggagagcagcaggcacagcgcgctcaccgcccgggacccggccgtcgtcgccgagcgccctccgccgccgccgcccgccgcattgcccttccccgcgtcgccgccgccaccggcgcgctcgcctgggcccatggcgcgttcgtcgcgcgtggactctccgagggggcggtgctgctggggcagaggctgggtgcgagaggagcaggcgggacagcccgaggcacgaggtccgccgggcgcgggggttagcctccgggtagcagcggatcgccgcgcacgcccccttcgccgcagccagctcctccacagcggccactttgggcagtttcctctatgcaaatagaccctgccagaaaaggagcagggacccacccaggggaggagcggccgggctggccccgcgcggcgagggggcgggggcgaggaaggagcgagctcctcggagccacccgtcggcgccgggctgatcccacgcgcagcgcgcacctctgccctcacctagcccgggcgccggcacccgcccccgcacgcacctctgaggcttccccagcccaagcccgcactgtggaccccagaggtcggaggggagcccggcgacaccgcgccccttctgcagcccacccctggctggagcacccaccactcgtgccttagcacattcctctaaacttgtgaattacctttctgacacttgtaaaagttcaaaacttcaaatcctgcaaaaaactgagtgggtctgtcctcggtggtggattagcgccgcttcgtggcggaaagcgacctctgcgcactcacatttagagaggcagggtcgagattgcgccaaacagaaatacgccccttagaatcttctcacgagttcttagctgccggacttcggtgcgggaaacaaaaatggtaagactgtttctggcctggagagggcttttgagaaaactgagactataacgaatgggaaagattcagaaaatgaacttcaagtcttgttcaactgatgacttaattctgtattagacgcacaacttggccaaaaattatgatctagtatgcaccacacttaacctgtactgcgattctgctgcaaatttaaatcacagggctgaggcaagaaggctgtggcgtacagcctgggtccagagaacagaatgagtggcactaacaagtcttggcaggaaagggaagaactgctggaagtcaggctgggttcagattcctaccaggcatattcatgtcctaaatgggtcccaagtaactctttcgctaactcctgtaatacctaaatgaaacaacaaaccagcagttcagatctttgtgatttgagtaaccccccaaccatttttttttaagaaaaataacgttatatccatcttccctctcactctggatatcttctggttgtctcatttctgtggatactcaccttttagaactgttgagtgcctctggctaacatgttccatctccttcccttaattcagaggggaacccctgagatggccgggggttatggttgatagacttggctctgtgctaaagtctggtgtatgcccaatagaatgaaaagttggcctcattctgaaaagaggccaacaccctcttacaagtcagcactacatttcttacaggcacataaactgcacaccacctacctatgttaatgttactgcatgtattgtttgccatgttcctgaagcttctgtgtattgaaaaagccaagctcactggcccctgggcctctgcccttgcctaccacctcactacctgcattcctgctctcagatcgttaaacggcaagcccctcctcatcctccaggtcaaggtcctcaacctcactgcttctaaaagatcttcccagactgcccaatttaaggtggcccacaagattaatcagggaattggggcggctgaattaagatggaaatactgtctgcaactcattctaaaaggcgaaaaagaaaatgacttacttgtgtccattagggtcctggaa

SEQ ID NO: 116 - DNA, 199182 bp, Homo sapiens
  source 1..199182: mol_type = genomic DNA
atttgatggtttttctccatcctgtaggcattttacagacaggagttttcaactggtcacaggggcagagcaagcctcagggcatctgcacccttaggttgcttttggaagaattaggaaaaaagctcccaggccgggctaggtggctcacacctgtaatcccagcactttgggaggcggaggtgggtgaatcacctgaggtcaggagttcgaaaccagcctggccaacatggcgaaaccccgtctctactaaaaatacaaaaattaacccgaaatggtattgcttgcctgtaatcccagctactcgggaggctgaggcagaagaatcacttgaacccgggaggcagaggttgcagtgagccgagatcgcaccactgcactccagcctgggtgacagagcgagactccaactcaaaaaaaaaaaaaaaagaaaaagaaaaaaaaaaaaaggaacaaaatgctcctaacccgggcgagtagagtacgggctggatttctggtcccacctgggcctggagcagggtccaagccctatgggaatcctgcaacatagaaaagaccaaaacttgggtccaggctggccttgggcccagcatgggatctaggactctgcttttctgtttataaaaggtgggattgtcctacatcttcctgaagcccttttctggataggatgtctcatgaatctgtgattctagctacaacttttttctttttttgagatggagcctcaccttgtcatccaggctggaggccagtggcctgatattggctcactgcaccctccgcctcctgagttcaagtgattggcttgcctcagcccagcctgtagttgagattacaggcacctgccaccacactaggctaatttttgtatttttagtagagacgaggtttcaccatgttggccaggctggtctcgaactcctgacctcaggtgatccgcccacctcggcctcccaatctagctacaacttctcaccccaactgacccttccgcccctcccaaagcttcttacctggaagagacagcggggcaggtgggggctggaggttaaaggggaaggaggagaatcctgggaagctctggtcagtttctcacgggaacgcagcgctttgatccaaagagccctgcacaaggatcggaagactcgcatttgtctggcttaactttctccagcctcagtttccacttctgaatgggaccatcgagggcagtgtggcgaggattcaccaacatcgtccaggtgaaattggcagacacagaatgggcgctccgaaagcattcgcggacccgaagaaggtttggtttcaaaggttctaaggtgtgtagcgggggcctgggcgcgaggtctggctttcggggtgttaggctccagggacctcctgcggagctcgcaccctagctctgccgccactgccgcctcctcggccccggaccgccgagggttaacaaaaaagccccacgccccctttgacggcttagagcccacctcgccgaatttgaaaaggcggccccggagaggcgtgggcgccccccacacatttccagctcgcacccgggctccgaccgctcgccccgctcctctcgctgtgctcccggccggtgccgcgggttcggtccgggcgccggtgcgctcctgccggtcctcgtgcccgggactccgggtccccgcgggctgctgcgcacgatgaagctggccctgctcctgccctgggcgtgttgctgcctctgcgggtcggcgctggccaccggcttcctctatcccttctcggccgcagctctgcagcagcacggctaccccgagcccggcgccggctcccctggcagcggctacgcgagccgccggtgagtagctcggggccgaggggccggggggtggggggagggagcggacagcgggggccctggccactgggtggctggagcgaggcttgggggctggagagcggggcgatccgggacttgggggcgcagggcagcggggactgggggctgcagacaccgggcagctggaacgagagctggagggggttggggtgcggggcgattcgggcctgggggcgcggggtggcggatgccaggggcaggggacacggggcaactgggacgaaatggcggtggctgggggttggggtcacggggggaaagaccgaagggccttgggtgcagggcgattgggggctggggcgcggggcggcgggggttgggggctgcagacggggcagctggaacgagcgatggaggaggctgggggttggggccgcggggctgcggggctgcggggttgcgggggctgaaggttcgggtccggctccggggctgcggtggtctctggccgcgcccaccctgtcccttcctttcttcgcttccccaaccttcgccccctcgttccgggctccgagtagaggtggttccgaccgccgtggctggggctggggctctgcccggggcgttcggccgctcacgtggctctgccgctcacctgcgcggctgcggctttgtgtcgcggagcaggttctcgggtggccaaggcctcgcgtcccgggcacccctctcctatcagcggccccaggacaccagaggggtcattcccgcccagtctttggggctgaggccgcggaggatcctcggctgcgactccccagccaccccgggacgtggaaccggctgggatcgggtggctccgtggcggggttggagagggcgcagggtcaccgggcccgggcgccgggacccgccaggcgtctccttcctctcggccggcaggtggcgccatggccacccccgggacgctcagggctgcggctccggagcccgcatttgaatttccccagaaaaccataagcatgcaagtaaaagttgccaaacgcctcgtttgcataactcgcttgaatttagcttttctcatttagtgataactacaacctacacagctatgacagcgctctggaatgcactacctgtgtctgttccctccgtctcttttttatattttaattttttttttttgcagaggcagaatctcaactctgttgcccaggcttgtcgcaaactcctgggctcaagcgatcctcccgccttggcctcccaatctccatttcttttgatccttaacaaccctagggttaaaacattagagtagtatctttcctttagctgaagaaacagaggctcaggatttgctaggcctaggagccactcaggactgacctcttgtgctttctttcttttttttttttttttaatatagggtcttgcttgctccccaggctggaatgcagtggtgcgatcatagctcactgcaaacctgatctcccaggctcaagtgatcccccgaccttggcctcctgtgtagctgagatcacaggtgtacaccatcatgactggctaattttttgattttttgtagaggtgggatctcactgtgttacacatgctggtctcaaacttctggcctcaagagatcctcctgcctcggcctcccaaaatgctgggattacaggcgtgagccaccacgccaggcccagatctggtgttttctagcatactgctctgcctatcaaagctaaaagacagctcctagttctttttttctccttgatatttaccaaatcagaggactccaagatgatttctggctaattccttaataacaaggagacagggatgtttcatgctgggaagaaatatacagtcatggctgaatagggcgggacccagaaaagcataaaagtgcctctggaaaagtttgtatgcaatcctatttctctcattttgtttggaaatacttacccggggcttctatgaggagcattctccaaacacccacgctagtgtggcctctgcacagttccatatgaggattgtctaaaaaacaagcttttcaagttacagaataatatatacagcacgatttcatttatgaaaaggaaaatcagatctacatctaggtagataaatgcctgaaaaaagtttctaggaaaccatttcagcagttaatgttatgaagaagtctagggctgggccaggggactgtcccattttccctctgtctgcttgtggcttgtctgaatgtttttctggtttctgtgttttttttgagacagagtctcgctctgtctcccaggctggagtgcaatggtgcaatcttggcttactgcaacctctgcctcccaagttcaagtgattctcctgcctcagcctcccaagtagctgggattacaggtgcccaccactgcgcctggctaatttttgtattgttggccaataaaaaatgtaacgttggccaggctggtctcaaactcctggcctcaaatgatctgcctgcctcagcctcccgaagtgctgggatcacaggcatgagccactgtgcttggtccctaagagaacctactggccggtacggggattgaatggatgttttgcaaggagcgtatattcatgtaatacttttgtaattaaaaggtgtgggaaggaaaaaaaaaaaggtgtttgcagcctgaaatacgcctgcaaaaaagcaagaggtgaggaccatgaagagcgggagcgaatggggacctcattctggcatttggtgggttggaacttggggacatctgcagaaacttggaagggatcattttagcacaaacaaaaagaggctcaaacaagtgtggaatcttccagaactctttccaccaggataagaacagggagaggatataattaggtttagggaggatgtggatgaatctgtgggcaatggattcctaaaaaggataccagaaggtgttggggaggcttggggcacattgatattccagagtgtgactgagtctctttgcccagaaagcccagcgtgggcattgcaggcacctggttgttgcctgggtgagttacaggctggagctggcttgggcgtcacatgtttctgtgtctcatgagctatctatcacaagtgtcccttgtccttgagatccaagatgtccagaagctgaaggcttggggacagcagtggtccttgcagccttggccttcagtagtgtgtttaccggggcttggcttcagttgacaggcaatgatgacagggctgtttcttgacaaagagtgctttaatttcattgttactgctccttgttaacgtctgatttttttttttttttttttttttttttttttttttttttttttaaagacagggtcttgctctgtcacccaggcaggagcgtaatggtgcaatcatagctcactgcagcctcgacctcctgggttcaagcaatcctcccacctcagcctcctaagtagttgggaccataggcatgggccaccatggctggctaacttttaaatttttcatagaggtggggtcctgctatgttgcccagggtggtcttgaactcctggcttcaagtaatccttcagctttggcctcccgaagtgttggaattacaggtgtgagccactgtgcctggccaaaaagcagtttttaattgttagtttgttcaaatcaggatctaaataagtctgcttattggttattctgtcttttctctcccttttagtgtaggaaagtcttccccctttgagagagtactttttcctccacgctgttgacttgttgaagaccagttgttctctgcgatgtccacgtactagatttagctatttccttcccagtggtgtagttaacttgatctgcaatgtccacgtactagttttgactaattgcttcccagtggtgtaattaattggatcctctgccccctgtatctcttctattttggaagttaggttggaaggtttgattagatttatggtctctatttgggcttgctgggagagacagaaattcttcataggtggtctagtctaccatattatatcaggagatgctctggactgatgtgtgtgtccccaccaaattcatatgttgaagccctatcctccaatgtggtggtatttggaggggggacctttggaggtaactagatttagatgaagttgtgagggctgtgccccattatttgattagggatgttataagaacaggaagagaggccaggtgcggtggctcatgcctgtaatctcagcactttgggaggcccaggtgggtggatcacctgaggtcaggagtttgagaccagtctggccaacatggtgaaaacccgtgtctactaaaaatacaaaaattagccgggcgtggtggtgcacaccggtagtcccagctacttgggaggctgaggcactaaaatcgcttaagcccgggaggcggagggtacaatgagctgagatcatgccactgcactccagcctgggcaacagagtgagactctgtctcaaaaaagaaaaaaaaaaaaaaaaagaagaagagaaatcagagctctctctctttgccatgtgaggacacagcacagcaagaaggtggctgtctgcaaaccagaaagagaaccctcaccaggaactgaatctgccagcaccttgatcttagacttcccagcctccagggctatgagaaataaatgtctgctacttaagccattcagtctgtggtattctgttacggcaaccttgagctgactaacagaaggatgtggctttattctggaaagctgggtgttaaatattcagcagaacaccactgtctacaagtctcctccactgtctcccttctttttgttgcaatttatttgttgaagaaacttggccttctagattgttcctttttcaggattttgttggttatatgctcatggtgcctgtgaacatgttcatctgtcctctttatttccagataatgggaaattagatcaagagcttggttggatctagttcttcctcctccttcgttttctattttggcagaattacatcttgggtgctgtagtgtttttccattggaaatcacaacgtctggttgtctctctttttctctcgtgatgcttgaggtgttggtgatcattgcgtatgtcattctttcattaaggatcgcaaagtggatgcaagacaggcaggcccccaaattggggcttagccaggagggttcttggcttcacccaggaaagaattcaagggtgagtgggtggtttcagacagcaactttaattgatgtggcagtgtacagctgcagcagaggtcctgctccttgcagagcagggataccccataggcagtgtgcccagactagcagctcagaggcagtttggcactatttatacttacttttaactatatgcaaattaaggggcagtttatgcaggaatttctaggatgaaggtggtaacttctaggttgttgggttgttgccatggaaaggcatggtaacttccgggtgttgccctggcaaatggtaactgacatggtgccctggtgagtgagtcttatggggatgtgcttcgtcctaacctgttttagctagtcctcaatttggtccggtgtcaaccccaacctccagagtcaagtcccgcctcctacttcaaagtagtactataattttgactctttttaaaattcgtaattgctagaatacttataatttcccccttatttactatttgtaggtagaaaaaactcactcaaaatctggctctttccaaaaaaaaaaattctttttgcaaatgtaagcaatttgtgtgtgtatgtgtgtgtgtgagcgtaacagtgtgtatgagtatgtgtgtgtttgtgtctgtatcctcctccttttcttacacagaggtaatatgctagttactctgtcttcaacttggcctttttccatcataacgtgttgtggagatggctctatcaaaaagcaaagatgggggggcatgatgactcacgcctgtcatcccagcactttgggaggccaaggtgggtggatcgcttgaggtcaggagttcgagaccagcctggccaacatggtgaaaccccttctctactaagaatacaaaaattagctgggcatggtggcgcatgcctgtaatcccagctacttaggaggctgaggcaggagaattgcttgaacccaggaggtggaggttgcagtgagctgagatcacgtcactgcactccagcctgggtgacagagcaagactcagtcttaaataaataaataaataaagcaaaggtaatctgcatctttttttttttttttttttttttgagacagagtctcgctctgtcgcccaggctggagtgcagtggcgcaatctcggctcactgcaagctctgcctcccgggttcaggccattctcctgcctcagccttctgagtagctgggactataatcacccgccaccacacccggctaatatttttgtatttttttttagtagagttctgcatccatttttatgggtctgttgttctgtacagtgtgagtgactgtatttattcagctagtcctctactgatagacacttgtgttggtaaatggcaaacacatgtttaattctgctagatagcgtcaagtttccctccactggggttacagcattttgcattcccatcagcagtttcttcttggggtacattttgaagagtccattttattttattttatttatttgttttttgagatggagtttcgctcttgttgcccatgctggagtgcaatggcatgatctcggctcaccgcaacttccgcctcccaggttcaagcgattctcctgcttcagcctccgtagtagctgggattacaggcatgtgccatcatgcctggctaattttgtattttttgtagagatgggtttctccatgttggtcaggctggtctcaaactcccgacttcaggtgatccacccgcctcagcctcccaaagtgctgggattacaggcatgaaccaccgcgcctggcctgaagaggacattttaaatgatgctggttgatatggcctttcaggggtaagaatagacttccctgatcttatagcacctgcaagtcctggccacccctaacctttttggggcttggggcaagactaaagatgaagaccattcaccatttggctagatatttaaaagtataaaatcaagctgacacactgtttgttttgttgttgttgtttgttttgtttttgttttttgagacggagtctggctctgttgcccaggctggagtgcagtggcacgatcttagctcactgcaacctccgcttcccaggttgaagcgattctcctgcctcagccttccgactagctggtattacaggcatgcaccaccatgcctggctaattttttgtatttttagaagagatggggttttgtcatgttggccaggctggtctcgaactcctgacctcaggttatctgcccacctcatcctcccaaagtgctgggattacaggcatgagccactgcaccctgcccacctttccttcatctatacctgctgcttcaaactctctctgtctctgaattcactttcttgtggtttcgtctaagccaaagtgcttggtgtgtcccctcctcactcaaaatgcctccctcttaccttgactcccccctcttttggtagaaccacaagcacccttcctccaggaagtctctctggatttacctcccagctttctgttcatctcatttgtgggtagcccctgcacctgtgatttgtgggtagcccctgcatctgtgattgtggttttggttctagaactcacttccccagtttccctccttgcagatggagtcatttctccttcctcatttactccctacaggagtggctctgagcagccgtccttgggcaagcgtgcatgagctggagcttagccctgcccaccacccaccactgcctcttggaaatgtgagccgctccaggtcaggcatttaatcaccttgcattcactgagcccacgtgtaggtagggtagaggctggggactcaaacgtgaaggcagggggctgtgcctggtggcctgcatggaggaagagctcagcagactctggggaagtggatgatcacatccatggggacttgtccctccgactggattgcatgcctctgcagtgttggacccctgcctttgctctctggttccctacattcaagaattggcaactgtgattagctatggtgcctcatgcctttaatcccagcactttgggagaccgaggtgggaggatcacttgagcccaggagtttgagaccagctgggacaacatagccagaccctgtctctgtaaaaaaaaaaaaaattaaaaaattagctgggtgtggtggtgcacacttgtagtcctggtggaagctgaggtaggaggatcacttgagcccaggagtttgagaccagcccgggaaatatagtcagaccctgtctttgcaaaaaaaaaactttaaaaaattagttgggcatggtggtgcacacttgtagtcccaggtatttgggaggctaaggtgggaagaacgcttgaacccaggaagttgaagctgcagtgagctatgattacaccactgcgctccagcctgggtgacagagtgagaccctgtctctggggcagtgagatgtttcagacccagcctccgtccttgatgagctcagagactggttggggaaaacagatccatgagcaagagtggaatttggtgtgatacaaatgtgtgcaaagtgagctaggggagttagggtttgtgggagcctgggagtctttgtgcctcagttttctcatctgtaaaatgggaatgacttcagtacttcattaagttgttctggggcttacatgggttaatattaataatgttcttaggaaaaaggatagtaaaccctctgttcatgaatgtgaccgtggactgcattcatatgccttgcaaaggttgcaaggacgggggagttccacaaatatatgaagccttggaatctttttctggggagcattttgttttttgagacggagtctggctgtgttgcccaggctggagtgcagtggtgcgatcttggctcactgcaacctccgcctccagggttcaagcgattgtcctgccccagcctcccaagtagctgggattacaggcgcccaccaacatgccaggctaagttttgtatttttagtagagctggggtttctccacgttggccaggtcttgaactcctgacgtcaagtgatccatctgccttggcctcccaaagtgctgggattataggtgtgagccaccgcacctggccttctggggagcattttgttaggattgtgttcctgaccacatacttagggaaatgttctagtggatagagactaaatgttgaggacttctcagaggagtcaacataggaggtgggttttgtaggatgaacaggagagcttgaggcagtgactggggcattctgggcagacagacaactgtgtaaaggcttggaagtgtcattagctattgcctgacatatagttagtgggactgagttcagagtggctggactaatgggatgtggtggctcatgcctgtaatcccagcactttgggaggccaaggtgggaggattgcttgagctcaggagttcaagaccagcctgggcaacacagcaagaccccgtctctaccaaaaataaaaaattagccaggtgtggtggaacacacctgtagtctcagctactcaggagactgaggtgggaggattgcttgagcccaggagtttgaggccgcagtgaactatgatcgtgccactgcactccaatcagggtgacagagcaagagcagaccatgggcttgggcaggcagaggacaggcactgagcttttggagtctggatgtgaagtctccttcctgccaccttgaggagcttgccttcatagtctgggctttgtcacagtcaggcttgtgccaactttgctggtcggggagaggctggcagaggaaggatagtggaaggagggaggccagttaggaggtagttgatggatggagcaggggagaagggagtgctcagagctagcaggacctggccccttggtggatcacggataggcagagacaggctacaggcctgagctcctggctgtctccagtgcctgggggacaccaaggagcctgctgctttgcttctcagaacattgcaaattttttgcagcactttcttggtttgcaatggcagcaaagcagagttcaaacatcttgcatttttgtgaaatacttttatttttcctgcatggagttttcaaccccaaatttcagcatctcctggacttgcacggatcaggtgctcaaggaaagtttgttgagtgaatgaatgaacacatgaatgaatgaacaaataccttgacctttctcctttgggacaccgaggcagtgcctctgcctcagtgcacgtttgcagttctgagggatcctggagcgaggtccctttctctgcacaggccagctcctgaagctgcttttaggggaaccatggagactccagctttagaggtcccgcttctccctttgaagtgtgagcacatagaggagggagacttttcctgagaatcacacagaatggctttgatgttaatatcagtgagaccttgtcctcaagctccaggattttctgaatcttccctctcttcatctcactcccctcttcccccagctcatctgttattttaaaatccattcccagagaaacaattcctatggcaataagagcactcctccaggcttctcttggctcgaactcgtgtgacacttcattgccacttccagagtgtgtgagctggacccggaccaattcagcctggggcaggggaaaagagcaacaataactaactgttagaggattttcgggaatgttagcacaaagtgctccgggaattctgcagacaatcctacggaaacatacacatgccgtgctgttctgccctccgagttgtcaggggtccctggccttcccagcctggccttgtctctacctgcctcccagaaaccagggtctagagcttctcttcggagtcctgtaacagactaccctgaaacaagctggactgagtccaggttaattctgaaatactggaggagagcggtgtgcgttctggccccctgcatctccttgtttgccccacccctaactacctccagagtgatctatgtaaagcaggagtccccaaccctgaggtcacagacaagtaccggttcaagaccagttcaaggaaccgggccgcacagcaggaggtgagtgataggcgaaaaagcctgaagcttcatctctacagctgctgccctcgctcgcattactgccttagctctgcctcctgtcagaccagcagcggcagtagattttcataggagctccagccctgttgtaaactgcacaggcgagggatctaggttatgcacttttatgagaatctgatgtctgatgatctgtcattgtctcccatcacccccagatgggaccgtctagttgcaggaaaacaagctcagggctcccattgattctacatgatggtgagtagtaggattatttcattatatattacaatgtcataataatagaaataaagtgcacaggccagacacggtggctcacgcctgtaatcccaacactttgggaggccaaggcgggcagatcatctgaggtcatgatggagtttgagaccggcctggccaacatggtgaaaccctgtctccaataaaaatacaaagaattagccaggtgtgttggcgggcacctgtaattccagctacttgggaggctgaggcaggagaatcgcttgacctgtgaagcggaggttgcagtgagccgagatcacaccactgcactccagcctgggtgacagagtaagactccatcttaaaaaaaaattttttttaaataaataaaaaaaaagaggaaggctgtgaagagtaggatctggaaccaggctgcctgagtctgagtccaggttctgtgtggccctgactaagttgcctgccctctctatgcctcagtcacctcatctataaaatgggtatgattagagtgtttccttcataaggtcattctggggcttatgcaagttaatattaatcaagcgcttagaacaatgtctagtatgtgctctaggaggccatatgaaaggataaaggcttctctcagatggtgtagtgtgctgatggggacttggcaaagcttgggaagatgatggatttcacaaacataggaagcatggctgggcacagtggctcacacctataatcccagcactttgggaggccaaggcatgaggatcacttgagaccaggagttcgagaccagcccgggcaacatagcgaaatcccctgtctacaaaaaaataaaataaaaattagccaggtgtggtagggcacacttgcaatctcagctacttgggaggggaggctgaggcaggaggattgcttgagcccaggagtgtgagaccagcctgggcaacatagcaagaccccatatctacagaagaaagaaagaaagaaaaagaaaattggccaggcacggtggctcacgcttgtaatcccagcactttgggaggctgaggtgggcagatcacgaggtcaggagatccagaccatcctggctaacacggtgaaaccctgtctctactaaaaataaaaaaattggctgggtgtggtggcgggtgcctgtagtcccacctacttgggaggctgaggcaggagaatggcatgaacccgggaggcggtgcttgcagtgagccaagatcgcgccactgcactccagcctgggcgaaagagtgagactccatctcaaagaaaaaaaaaaaaaaaaagaaaattagccaggcacggtgatgtgtgattgtagtcccagctacttgggagaggaggctgaggtgggaggatcacttgagcccagaagcatgagcccagccttggcaatatagcaagaccctgtatctacaaaaaaaaaaaaaaaagaatagaaactagccaggtgtggtgttgaatgcttatagtcccagctacctgggaggggaggctgaggcggcaggatcacttgagccgaggaggtggaggctatgattaagtcactgcactccagtgtgggtgacagagtgagaccctgtctcaaaaaaagtctcaaaaatatcctccccaaaacaaaacaacaaacatatgaggccacagaatccttttctagggtgccttttgccagggtggtgtctttcagactgcacaccctgtgagatgctgttgtggatgggggctaaatgctgaggacttcctagaggagtctccattcaaagcaggtcttgtaggatgagcaaaatgtcctgataggtttccggtgctctcccagagctggtcctaagcctgctcactggggtcgtttcggaccttctcctgtagctgagcccacccttgctgctgcaggggagccggagaaaacagaagctgtaatcctgatggtttttccttgtctcttaggaccctgctcaggttttcaagaccagagtgaggggtgtgggcctatctgcactcccagctgaacctcagccactttgggcgtcagtgcagaggatcatccccagatgtgattgaggagcagatgggagggatcggagggtgctcagatgcctgtggtgaggactgaggctgaggatttattttctttattttattttctttatttattttttgaggcagagtctggctctgtcacccagactagagtgcagtggcgtgatcttagctcactgcaatctctgcctcctggcttcaagtgattctcctgcctcagtctcccgagtagctgtgattataggtacctgccaccacacctggctaactgttgtatgtttagtagagatagagttttaccatgtttgccaggctggtctcaaactcctgacctcaggtgatccgcctgcctcggcctcgcaaagtgctgggattacaggcctgagccactgtgcctggccttcttttcttttttcttttttccttttaaatagagatgggggtgtcactatgttgtccaggtcagtctcaacctcctggcctcaagtgatcctcccaccttggcatcccaaagtgctgggattacaggcatgagtcactgtgcccggctgaggatttctgatgagcttcatgtcccagacagtgtgagagcagaagggacctggggaggccctaaggttggggggaaagggctttttctgccttgtctcatgcagccagcctgcagtgactcactttttttttggagccagggtctcactctgttgttcaggctggaatgcagtgatgtgatcacatagctcactgcagccttgactgtctggactcaagtgatccttccaccttagcctctcgagtaggtggaactataggcatgcactaccatgcctgtatcattttggtattttttgtaaagactgggtcttgcaacgttgcccaagctggtcttgaactcctgggctcaagcgattctcctccctcagcctcccaaagtgctggaattacaggtaggagctactatgaccagcagtgacttacttctgaaggacccacagttaagccagcaacttcccttcattgctttagtccctcatcagtgaacaaaacaaaataggttggaatcaaatgaggaaatgtgtttagtagataggctgactgatcattgctgttcatttgaatgagggctccatctatccttttttaaattttaatttttttacattttagagacagggtcttgctctgtcaccaaggctagagagcggtggcacaatcacaggtcactgcagcctccacctctcggactcaggtgatcctcgtgcttcagcctcctgagtagcttggactacaggtgtgcaccagcatgtctggctaatttatcatttaaaaattttttggggggctgggcctggtggctcaaacctgtaatcccagcactttgggagactggggcaggtggatcaccttaggtaaggagttcgagaccagcctggtcaacatgttgaaaccctgtctctactaaaaatacaaaaattagctgggtgtggtggtgcatggctgtaatcccagctacttggtattggctctgtttctccataggctgtgaggcagggatttaacttagttttttactcaaaccgccctcacacttttattgaataacccattcttccttgctaatttgaaatgccacttttatcatatactaaatttccctatatgcatgaagcaggagaatcgcttgaaccggggaggcagaggttgcagtgagctgagattatgccgttgcactccagtttgggcgacagagcaagactccatctaaaacaaaaaaaatttttttttgtacagacagtgtttccctatgtcacccaggctggtctcgaactcctggcttcaagcgatcctccagacttgggggctggggacaccaagaccggtggggggacagacatttgctctgcatgtgtgtaagctgtttgcactcatgactgagtggtggtttgcagcctaaatattatctgtctttgtttgcaagaatttgatctcccaccccctttcttgttctggaaatgcaaggactctgcggcatttgtccgagaatctccgacagttcccagccccttggaggatgtcccctgcttggagtctttatgatcggctcagacttttcttttccccggggagttgtccctggatcagggtttgttgcaggatgtctgcggctgtgcggcccctggaggcgaccaggcctgccaaacactcactggagtctcacttgggcttccccagcccccgtagttacgaagcctttgagagaaggtagcagtttccttctgatttggctccggctgtctgcgccccagccagttgcctctggcttctgacatttttgtcattcctgctcttctgggagggtttatctcccttcctggcctcctttgattgacttggccacacggctgatgcttgggctccaagaagtcttggcctgccccgggcacccatttctgccgtgatgtgatcctggctggctgcaggatttgccagcctcttcccatcttttgttctgcgactgatgacaattagaccctgaaacgcttcacacagggactctgaacatgtgtgtctaccagggcaggagtggagcaggcaggtgagcctctgcatcaggggctcggagggagccccgtcctggctctgcctgatgggagaagacctggctgtgctcctggtctctcttggtgctctgctcaccattgcctgcctttcaccctccagatccttcctgcctctcaccctccagatccttcctgcctcagggcctttgcacagattgttgcccctgcctttgtcagaggtgcgtgaaccacagcagctacatcatgaatacaggttgggtaaaatgaggctgaggcctactgggctacttacccagatggttatggcattctaagtcacagggcgagataggaggtcagcacaagatcataaagaccttgctgataaaacaggttgcagtaaaaaagccggccaaaacccaccaaaaccaagatggagatgagagtgacctctggtcgtcctcactgttacactcccaccagcgccataacagtttgcaaatgccttggcaatgtcaggaagttaccttttatggtctaaaaagggaaggcatgaataatccaccccttgtttagcatatcatcaagaaataatcataaaaatgggcaaccagcggcccttagggctgctctgtctatggagtagccattctctattcctttacttacttactttcttttttttctttttgagacggagtctcactctgttgcccagtcaggagtgcagtggtgcgatctcggctcactgcaacctctgcctcccgggtttaagtgatccttctgcctcagcatcccgagtagctggcactacaggtgcctgccaccatagctggctaatttttgtatttttagtagtgatggggtttcactatattggccaggctggtctcgaactcctgactttatgatccacctgcctcagcctcccaaagtgctgggattacaggcgtaagctactgcacccagctacatttttttttttttttttttttgaaacagagtctctctctgtcgcccagactggagtgcagtggcgctatcttggctactgcaacctctgcctttcaggttcaagcaattctcatccctcagcctcccaagtagctgggactacaggcacgcactaccacgcctggctaattttttatattttaatagagacgagggtttcaccatgttgcccaggttggtcttgaattcctgagcttagccaatccacccaccttagcctccctcctttaccttcttaataaatttgtttttactttactctatggacttgccccaaattctttctcacacaagatctcagaactgtctcttggggtctggatcaggacccctttctggccacaccctgatcagtctttgtgacttttggcctaggtaactcctgcccagactttagagatcagcttaaacatcacatcttcagggaccctttacttgcccttcaggataatatcaggttcctttgttaaaagctcttagagctagctctctaacttagaggcttatgacaacagtgagtaaattccataactaacgaattgataattcatgagtggttatcttcccagagatggcaaattctcccagggcagtggtcctgtctggttttcttctgtagctctaggttctaggttgttctctgtcatccttgcctggattacagagggtgcttgggaaatgaccaacctctttgcaagctgtgttagattcgttttgctgctgtaacaaattaccacaaatttagtgacttaaaataataccagttcattatcttacagttcttgagatcagaagtccaaaatagctctcactgggctaaaatcaaggtatttacagggctggtctttttggaggctctgggaaagaacctatttccatgccttttccagcttctagaatttatcagcattccttgacttgtacctccttcctctatctccaaagggcattactccaacctttctttctgatacctcctttctctctgactttgatcttcctgcctctctcttgtatggaccttttagattaggttgggctcatctggataccccctcaacttcagtatgcttaatttaatcatcaagtccctttaaccatgtgtcttagttccttttgtgctgctggaatagaaaagcacagactggataatttataatgtatgaaaatttattggctcatggctctggaggctgggaagtccaaaagccaggggctggtatctggcaaaggctgtgtcattttatggtggaagggcaaagagagggagagaaagagcgagagattaaactctaagcctcaagcccttttacaatccgtataatctattcgtgagggtggagcttttatgacctaaacatcttccattaggccccacctcccaacactgttgcactggggattaagtttctaatgtgtgctttgtgggggacacattcaaaccatagcactgcataagataacattttctcaggtttcagggattagaaagaggacgtccctgggggagatattatttggccaaacacacaaacggagatgaaaagggaaagatgtgccagatactggggagccttggagggttgcactgatcttaggctccaaaaagaattaagactgaaagtggctttggcatcaaaaggctgttaagattcagccttgagctaagggtcattagagcatggattttccatttgttttttaaaatttttatttatattttgttgctattttgagatagggtcttggcctgtttcctgggctagagtgcagttgcatgattatggcttactgcagtttcatactcctgggctcaagcaatcctcctgcctcagcctcttgagtggctgggactgcaggtgcatgctaccatatctggtcaatttttaaatattttgtaaagaagaggtcttgctatcttgtccaggctggtctcaaattcctggcctcaagcaattctgggttggcctcccaaagcactgggattacaggtatgagccatcgtacctggctctgtttctccataggctgtgaggtagggatttaacttagttttttgcccaaactgccttcacacttttattgaataacccattcttccttgctaatttgaaatgccacttttatcatataataaatttccctatatgcatgatcctttttctgaactcttattttctactgaactctatctggtctggtgccaaaaccacagttctgtgttttaattattatatctttatcatatattttgttagctgatagaacaatttctccttcactgttctttatcaaaatattcttagttgttcttatacatctttttattttgggtgaattttaaaatcatcttttctaggtttataaaaatgctgttgggattttgatcagggtgtgttaaattaatggagtcataggattacaggtttatggccaagcttggtggctcacacctgtaatccaagcactttgggaggctgaggcgggcagactgcttgaggccaggagtttgagaccaggctggccaacgtggagaatatcgctactaaaaatacaaaagttagctgggcgtggtgatgtatgcctgtaatcccagctactctggaggtggaggcaggagaatcacttgagccccggaggcagaggttgcagtgagctgagatcacatcactgcactccagcctgggtgacagagcaagatcctgtctcaaaaaaacaaaaacaagaaagaattacatgcttataacattgtgtgttttttaggaacatgtcctgctgctccattgactcagagttttttagacttaggcattttatcatttttattgctgtcatgaaaggactcttttgttccttgccatttataaacatttatgtttggcaggtaggaaagctgttcatttgaggcatgtcgattttgtatcagctacctttgtgaattttcaaaaaattattttaatttttttttaggtagttctctagggtttttggaggtggagaattttattttttatttttatttttattttttattttgaattttaattttttgagatggagtttcacttttgttgcccaggctggagtacaatggcacgatctcagctcaccgcaacctccacctcctgggttcaaatgattatcctgcctcagcctccgaagtagctgggattacaggcatgtgccaccacgcctggctaattttttttttcttttttatgagacagagtctcgctctgttgcccaggctggggtgcagtggcatgatcttggctcactgcaatctctgcctccccggttcaagcgatcctcctgcctcagcccccctagtagctgggattataggcatgtgccaccgtgcccagctactttttgtatttttagtagagacagggtttcgccatgttggccaggctagtcttgaactcctgacctcacgtgatccacctgcctcggcctcccaaagtgctgggattacaggcatgagccacagcgccctgcctaattttgtatttttagtagagatgggatttctctatgttggtcaggctggtctcaaactcttgacctcagctgatctgcccacctcggcctcccaaagtgctgggattactggcatgagccgctgtgcccagccgataattttttttttaaggaaggcaatattttttgcaagtttgtttatttatttatttatttgagacagggtctcactccattgacaagcctggagtgccgtgatgcaatcactctttactgcagcttccaactcctgggctcaggtgatcctcccatcccagccttctgagtagctgagaccacaggcgtgcgccaccatgcttgactaatttttaaattatttgtagagatgggggtcttcctatattgttcaggctggttttttttttttttttttttttttaagacggagtctcactgtgttgcctaggctagagttcaatagcgtcatctcggcttactgcaacctccgcctccggggttcaaaccattctcctgcctcagcctcccgagtagctgggattacaggcttcagccagctaaattttgtatttttagtagagatggggtttcaccatgttggacaggctgatcttgaactcctgacctcaggtgatccacctgccttggcctcccaaagtgctgggattacagacatgaggtactgtgcctggcctcaggctggtcttgacctcctgggctcaagcaatcctccagcctcggcctcccagtgtgttgggattacaggcatgagctattgcacctggccagtggagactcttatagtcttccaatgtgtgtgtatgtgtgttggtcattgtgtgtgttaggactctctagaggggcagaactaataggatatatatgtatatatgaaagggagttgattaaggagaattgactcatgcaatcacagggtgaagtcccataataagccgtctacaagctgaggagctaggaagccagcagtggttcgtcctagttccaaaacctccaaagtaaggaagccaacagtgcagccttcagtctgtggctgaaggtctgaaagcccctggcaaaccactggcgtacatttaagagttcaaaagctgaaaagcctggcgtctgatatttgagggcaggaagcttccagcacgggagaacaatgaaggctggaagactcagcaagtcagctcctttcaccttctctgcctgctttttctagccacgctggcagccgattgaatggtgcccacccacattgagggtgggtcctcctcacccagtccactgactcaactgttaatctcctctgaaaacacccagaaacaactagaaacaatactttgcattcttcaatccaatcaatttgacactatatatacacacacacacacacactatatatatatatatatatacacacacacacatatatatgtgtatatatatagtatgtgtgtgtatatacggtgtgtgtgtatatatatactcgacactaaatatgtatatatatatatgtgtatatatatgtgtgtatatatatatatatatatttgtgacggagtctcactctgttgcccaggctgcagtgcagtggcgtgatcttggctcactgcaacctccgcagcctgggttcaagtgattctcctgcctcagcctcctgagtagctgggatcacaggcatccgccaccatgcccagctaatttttgtatttttagtagagatggggtttctccatgttggccaggctggtctcgaactcctgacctcaagtgatccacttgcctcagcctcccaaagtgctgggattacaggcgtgagccaccacgcctggccccatacaattgaaaaaaattttttttaattttttaatttatttgtttatttgttttttgagtctcactctgtcgcccaggttggagtgcagtggtgcgatctcggctcactgcaaactctgcctcccaggttcacgccattctcctgcctcagcctcccaagtagctgggactacaggcgcccaccaccacgcccggctaattttttgtatttttagtagagaccggatgttagttagctagtagttagctaggatggtctcgatctcctgacctcgtgatctgcctgcctcggcctcccaaagtgttgggattacaggcgtgagccaccgcgcccggccacaatttttatatgttggttatacctcagagaaataggggaataaaaaacctcaaaaccttgttgagtttcatcaagggtggggcttcatcttttttgcagaggatgtccgaagtagaaggctctgaggggagagaaaagttctagagaggggatgatgctgcagttggccagactgcattctgaattgtgtatctcctgccgagtgtctgccctgagcaggcctcctctggtcctgtcctagcttgtttttttttttttttttttttttaattttttgagacagggtctggctctgttgcccaggctaagtgcagtggcacgatcacggctcactgcagcctcaacctcctgggctcaagcaagcctcctgagtagctaggactacaggtgtgcaccacctagctaattttaatctttattttttttgagatagggtttcactctgttgcccaggctggagtgcagcggtgcaccgcacctggccctggcttgctttgttctcgtttcacgcacttcatctgcagctgaaccgcaggcccctgggggtcaggagccctgtcccagaaggttatgtctgtcacgacaggtaatccagcactgagcacaggatgtgaattaaaacaatcccttattgaatcaacggcagctggacccactgggacagcgctgtgttgactttttgggctgcaaagtccaactcacgcaggagctcacaaggctggagttggattctgacccgaagtgaaccaggagtgaacagggagcacggtggacccagacccaatgtgagggtccaggctgttgcctgagtaaggagtttggcaggaaagctcaatattctgtactggaagggggtggtagcattgcaagttgtctgcctgctaggcctaggtccgggacagctgcttgtggggacagctgtctcagcgtcggacagagcatctgccctagattaatcccagaacctggccacgcccctggggagcagagccggggtagggttaccgcacaccaggaaacgcgcctgctttgctgacagcgggtgggtagcttgcaggatggatgggctctgggggcggccaggggtgccactgggaaaggcagactcactgctggctgagccaaagccacccccacgggatgcaagctgacactcccaagagctgctttctttccgctggacccgaaaccggcacgagatgatctccaagaattatgagaagagttgggaatggaaaccaaatgttcgtgtcaggtagaaaaagctgatggaagcccatagcccagcaggctctgggtgcttcagggttcaggctcctgtggtcagcacagatgtttaggtgaaagaaacccgacacactgaaaaaaaaaaaagtttattttttcccccttgattatatttattatagaaaacctggaaaatctggaaaagtgaaaaatcatttatcattgtattttgcaaacattttaaactttttattatttatattgtggtaaaatagacctaacagacgatttactgtcttttattttcttctttttatttttatttttttttgagacagagttttactctgtcacccaggctggagtgcagtgtgaagcattctctctctcgctctctctctctctctttatatatatataaatacatacatatatatataaagagagagattttatatatatattgtaatattttttaacatatattttaatataattatatatatatatatatttatatatatatatatatatatatatttttttttaagacagagtctcactgtgtcacccaggctggagtgcagtggtgcaatctcgactcactgcaacctccatctcctgggttcaagcgattctcatacctcagcctctcgagtagctgggactataggcatgcgccaccatacctggctagtttttgtttcttattaaagaggggtttcaccatgttggccaagtatcggactcccagcctcaagtgatttgctcacctcagcctcccaaagtgctgggagtacaggcgtgagccactgcgccctgccaaaatttaccatcttaaaccatttcccagtgtatagcacagtggcattaaagacatttacattgtcatgcaatcaccatcaccatccatctctggaactcttttcatcttgcaaaactgaaactctgggccgggcgccgtggctcacgcctgtaatcccagtactttgggaggctaaggcgggtggatcacctgaggtcaggagttcaagaccagcctggccaacatggtgaaaccctgtctccactaaaaatacaaaaaattagctgggtgtgctggtggaagcctgtaattcagctatctgggaggctgaggcaggagaatctcctgaacccgggagacggaggttgcagtcagccgagatcgcgccattacacttcagcctgggcaacaagagcaaaactctgtctcaaaaacagacaaacaaaaagccccgaaactctgtacctgtgaaatgctaactgcatttctgtcctcccctggcccctggcaatcaccacctattttctttttttttttttgagacagtctcactctgttgcccaggctcgagtgtaatggcacgatctcagttcactgcaacctccacctgccaggttcaagcaattctcctgcctcagccccccaactagctgggactaggggcacagccactgtgcccggctaagtttttttttgtacttttagtagaaacagggtttcaccatgttggccaggctggtctcaaactcctgacctcaagtgatcctcccgcctcggcctcccaaagtactgggattacaggcgtgagccaccatgcctggccctttttcttttcagccttggacttagcgactgagtagctcctcttgtacattgcctttctggaacacatagcagatcaggaatatctaccaattcctctgacaaggacaggattttggccgccatggggcttccccttcttgggctttttagccttgaggtgaccgtttttcaccttgccaccagaatcagccttcttggcttcaggtttcctcagtatccgtcttaacattttcacccactgtcttgcaagatgggaaagagcgggttttgaccgaatgggtatgaagtggtatctcattgtggttttgatttgtcttttcctaatgattagtgatgttgaacatctttttaggtgcttgctggccatttgtatatcttccttggagaaatttctattattaagctgttagccctgttttgaattgggttgtttctatattgttgttgagttgtaggagttccttatgtatctggatattaaccctttatcagatgtatgatttgcacattttttttttttttttttttgagatggagtctcactctgaagcccatgctagagtgcagcggctcagtcttggctcactgcaacctctgcctctggggctcaagcgattctcctgcctcagcctcctgagcagctgggactacaggcatgcaccaccatgtccagctattttttttgtattttattttattttttgagatggagtttttctcttgttgcccaggctggagtgcaatggcgcgatcttggctcacggcaacctctgctacccgggttcaagaaattctcgtgcctcagcctctcgagtagctgattacaggcatgcgccaccatgcccagctaattatgtacttttagtagagacgaggtttctccatgttgggcaggctggtctcgaactcccaacctcaggtgatccgcccatctcggcctcccaaagtgctgggattacaggcgtgagccaccgcgtctggcaattttttgtattttagtagagatggggtttcaccgtgttgcccaggtggtcttgaactccagagcccaggagatttccccacctcttcttgtattctgtgagttgccttttcactctgttgattggatctttcgatgcacagaaatttttacttttgatgtaacttaatttattgatatctctttttttctcctgttggctgggctttttttgggtgtcatagccaagaaatcattgccaatctagtgtcatgaagcttttaagagttttagaccttttaggtctcatgttaagggtttttttttttttttttttttttttttgagacaaagtctcattctgtcatccaggctagggtgcagtggcacaatctcagctcgctgcaacctgccttctgggttcaagcgattctcctgcctcagcctcccgagtagctggaattacaggtgtgtgccacctgtaatggggtttcaccgtgttggccaggctggtcttgaactcctgacctcaagcgatctgcccgcctcggcctctcaatgtgctaggattacagatgtgaggcactgagcctggctttagttttgttttggtgagacagggtcttgctctgttgttcaggctggagggcagtagtgcaatcatagctcactgcagcctcaaactcctgggctcaagccatccacccacctctgcctcctgagtagctgggactacaggcatgcactaccatgcctggctactttttaaattttttgagaaatgggatcttgctatattgtccaggctggtctcaaactcttggcctcaagtaatcctccagcctcaggctctcaaagcattcagattacagatgtgagccaccatgcctggcctggagccacttttaaagaagccaccagctttagggcatggaagtggatggagaagggagatatttctaaaaatttcttggaaatatctggtgaggtctcagggattccgaggctgggaagctcagtgggctgtgcaaccggtccaggctgtgtggggagggggccttgcctgtgggcctcccggggacctcagaattctttgctcctctctcctcccactgtggctttagagatcctttccctctctaggtctactctttggcctgtgccctttgcctctggcctgacctgctaaccaaagccttctgttctgaggtcagccgctgcctggctgtggtaacaggagcctcaggggaacagagcagcggaaggaaagggggatggggagggccccagcccttgaagctgagcagatggcaaagaaaaacatggcctgtttgcctctctggggtgtccggttctgggggcaaggcaggagtttctctggtctcagtttattcacacatgactgtgcgtgggagcatataggggggtgtgggtcaccccctttttgctggaagcatccgggcctggccgggattctattttttttattttttttaaaaagtgttcctggggcctgattgtatctgatctgtgaattcatcttgggcaagggctgtgatatactcctgggcccgtatcctaggacctagagaaggtcctattggatgacagctggagccaggaaatttcagaagcaaactagagtcttcatgtttctcatttagtccttctaggtcttctctatggttctctggaaggagacattgatctctgcatttggaccctatttttattattatttatttttgagacggagtctcactcttctgcccaggctggagtgcagtggcacgatctcagctcactgcaacctccacctcccaggttcaaagagattctcctgcctcccgagtagctgggactacaggcgtgtgccaccacgcccggctaatttttctatttttagtagagacggggtatcaccatgtcagtcaggctggtctcaaactcctgacctcaaatgatctgcccacctcggtcttccaaagtgctggggttataggcatgagccaccatgccaagcctttcttttcttttcttttcttttcttttcttttcttttttttctgtagagatgtggtcttgctatgttgctcaggctgatcttgaattcctggtctcaagtgatcctcccgcctcagcttcctaaagtgctgggattacaggcatgagccacagcacctggcctggaagtgcattctcagagtccagcagggcagtgtgtgttcttcgaggcagggaagtgtatgggcctgagacatcagtggatgcaaatggctaaggaaagaggtcattctggcagaggagggagaagttgctagagatttcactgcagaggtgtgacggggctgggccgtgagggtggcgggtgcacaggcaggagggttactccaggttgcaggaaaacagcaggagtgaaggtacatgagggccatgagtctggcctgttggggcagtgtgcatctacctcctgccccccagctataggcaccggttcctttttccatctgttgttatgagcaggtgccttccgtaccagctagggaacaagtatccaacaaccaggcttttttttttttttttttttttaagatggagtctcactctgtcatctaggctggactgtagtggtgccatctcagctcactgcaacctccgcctcccgggttcaagcaattctcctgcctcagcctcctgagtagctaggattactggtgcccaccaccatacctggctaatttttgtatttttagtagagatggggtttcaccacattggccaggctagtgtcaaactcctgacctcgagtgatccacccgcctcagcctcccaaagtgctgggactacagggatgagccattgcacctggccaaaaaccaggctttttggtgatggctgggaacccagaaagggtgacagtcatttgtgatccaattcctagttgtctgaaatgtgcctccctccaccgcatggcctcaccactgatagcttggtcacctatcagctgtgtggtctgggcttgccacgggtgggacgcaggagagtggccctcaaagataggtaagtcctaatccctgcaacctgtgaatatgctactttacatggtaaaagggactgttcagatgtaaacaaaataaggatcttttttacattttcaataaaaaaatgtttttttgttttttttttttttgagatggagtctcgctctattgcccaggctggagtgcagtggcacaatctcagctcactgcaacccccaccttctgggttcaagcagttctcctgcctcagcctcccagtagctgagattacaggcgtgtgccaccatgcccagctaattcttttgtaattttagtacagacagggtatattagtcagagttttctagagggacagaactaataggatatatgtatatgggagtttgttaaggagtattaactcctgaattaacacgatcacaaggtctcacaataggccatctgcaagctgaggagcaaggaagccagtctgagtcccaaagctgaagaaattggagttggatgtttcagggcaggaagcatccagcacgggagaaagatgtgggctgggaggctaggccagtctagccttttcacatttttctacctgctttatattctagctgcactggcagctgatgagatggtgcccacccagattgagggtgggtctgcctttcccagcccactgactcaaactgacaacatcttcacagacacacccaggatcaatactttgcatccttcaatccaatcaagttgacactcagtattaaccatcacacagggtttcatcatgttggctgggctggtcttgaactcctgacctcagatgatccacctacctcagcctcccaaagtgctgggattacaggtgtgagccactgtgcctggccaatttttaatttattttagagacagggtctcactctgtcacccaggctggagtgcagtggtgtgatcctagctcactacagcctcaaacttctgggctccagggatcctcccacttcagcttcctgagtagctgcgactacaggtgtgtgccactacacctggctaatttttaaaaatattttattttttagattaaaaaaaaattttttttttagagatgggatcttgctatgttgcccaggctggtctcaaacttctggcctcaagtagccctcctgcgtaagcctcccaaagtgctgggattataggcatgagccactgcgcctggctgggaaccaatgcttattgagcacctactgtgtactaggcttagagctaggaccagtggaccttgtaagagggtagcaagagggccagagtgagtagtaggagatgttaccatggaaaccagaggttggagtgatgtcaaaaagaagcctccagccaagggacagggggatctctagaagccaggaaaggcaagaaatagattctcccacggagactctggaggaaactcacctgctgtcaccttggacgtctcatttctagaatgataagattataaacgtgtgctgttttaagtcactcagttggtggtaatttgttatagcacaaggggttttgtttgttttttagagacagggtcttgctgtgttgcccaggctaaagtgcaatggtacaataatagctcactgcagcctcgaattcttggccttaagcaatcctcctgcctcagcctcctgagtagctgggaccacaggtgtgtaccaccacgcctagctatttttttcttttcttttttttttttttttttgtagagatggggtctcgctatgttgctcaggctggtcttgaactcctgggctgaagcgatcctcctgcttccacctcccaaagtgctgggattacaggaatgagctgctgcgcccggccaaccacactcttttctctcatctgtagaatggtctcagtatccttgtcctgactctgtgtctctgaggatgagaaagcaggagacctccagttctccttggctgttgctgtagatttgtttccataaagcggtttctttttcttttcttttttttttttttttttttttgagacagagtctcgtgctgtcacctaggctaaggtgcagtggtgtgatctcggctcactgaaacctctgcctcccaggttaagtgattctcgtgccccagccccttgaatagctgtgattacaggtgcctgccaccatgcctggctaatttttgtatttttagtagagacggggtttctccatgttggccaggctggtcttgaactactgacctcagacgatccgtctgccctggcctcccaaagtgctgggattgcgggcatgagccaccgcgcccagccccataaagcagtttctagatctcactgtcatatggctccgaatgtcctgttgtgagatctcttctgaaagggagaaaaccttatcctgaggaattctaaccgaaagcctggagaacccaccacagactgattaaaagaaatctttctcgtaggaaaactgcaagtcctgagtctccagctttttcatgtgtgacccttgggtggcccacttcagagcattctgcagcttgtgatgggtttaattttctgttttgatcccacggtgaaaccacaaatgagtagaagtgccttaggcaggccctccgccctggtagccccactcttgggatgaggctaggtgggaactggccgtctgcaggggttcctgggaaaaaagctctttaatcagcggggctggagggaaaatggctctgcaggaatgaattgagaacttgaaacggcatctttccctctggttgccaggggagagttgcaattcttttgcggtgattttgtgactttcttgtggtcaaccccctggtgcctgtcggacttgagcacagcagccagatgagaggggaaaaatagggggaaggtggctccttccacctgagggacatctgcctttaatcaccgctgaaaacaaagcaggccaaggaattgcctgcgacccgctgagggcagctcaggtatctctggaggctgcagccttggggttgtcgagggtctcagccttggggtctttgtgcacttaggtgctctgggagaaaaccttctggaactttgttttgttcacatccggcccttgcttgaaaactcctggtggcccagcatggtggctcacgcctgtaatcccagcattttgggaggttgcagtgggaggattgcttgagcccaggagtttgaggccagcctgggcaacatagtgagatcctgtttctaccaaaaaaccaaaaaaacattagccaggtgtggtgtggtggtgagtgcctatagtcccagctactggggagggtgagggggggataattgcttgaacccaggaggttgaggctgcagtgagccgagatcgcaccactgcactccagtctggatgacagagcaagaccctgtctttaaaacacaacacaacacaacacaaaactcctagtggttccccatgcctcaggccaaggttcaaatcccatagcatggcacttaaggcctttgtctcttcctagtctactgcccagcctcagcctcacttcccagcccctgactgactactccaagccccatagagctgctcctctgacaattccagagctgttaagcatttcttttttttttgagatggagtcttgctatgttgcccaggctggagtgcagtggcacaatctcagctcactgcaacctctgcctcccgggttcaagcaattctcctgcctcagcctccctagtagctgggactacaggtgcccgccatcatgcctggctaatttttgtattttagtacagatgagatttcaccatgttggccaggctggtcttgaactcctgacctcaagtgatccacccacctcggcctcccaaaggtgctggggttacaggtgtgagctaccactcctggccatgctctttagaggactgtggcaccctagaggaggacagaatcccaggcttggggacaagggtttgatgtcagagactggagaatgcagctccctagagcaagacccagtggagatcagacggtgaatgtgtggaagaactggggctccacatcttgtggctgtggggtgctccttcagcagcccaggcctggggtgacgctgggtagatggggctgtaagatgcagaggtgggggaatgaggagcaaagacaggctccaaagcatgggatggagagacatggccaaaggtgaggctttgggaacaaagggaggggctagagtccctgtgcaatgggtgaagttgacctccctgtccctccccggcagaaccagacaccaccttctaagggctcctgtgcactgcaggtccttgcctgttcttgtcacctgtgtcatgtttctgtgattctttgtgttgtctgtgtcttctcattagattgcaggtctccttttcagctgtctcaggccagtaagtgtctcaggatctggtgcttagaaagggcttcacaaatgttcattgaacagaggacttagaattgctttcttttccttccttccttccttccttcttcttcatcttctttctttttttttatctttcttttttctcttctttcttttctctttctttacttcttttctccttcctcctttctttgctctccttccttccttccttctcctttccttctccttctccttcccttcccttcccttccttctctcctccccccccctcctttttttttttgagacagggtctccctctgtcacccagggtgatgtgcaatggtggggtcatagctcagtgcagcctcaacctcctgggctcaagtgatcttcctgccttagcctcccgagtagctgggactacaggcacacaccaccgtgcctggataattttttgttgtttgcagagacaaggcatcttgctaggttgcccaggctggtctcgaactcctggcttcaagcagtcttcccacctcagccccccaaggtgctgggattacaggtgtgagccaccatgcctggtctaaagtgtataatctcaactatacagcttgatgagtttctacttatgtgtatgctcatgtaaaccaccattcaggcccagagggagaacatttccagcacccagagggctctggtgtgcccaggtaggccccctagaggtaaccatggttctgatttcatcaccatagaatagctttgcctgtccttgaatgtcatataaacagaatcattcagcatgaactctattgggtgtgacttcttttgctctgcatcatctctgtgtgattcatttagattgttgaagtggcttgtgctttttcagtgctgtgtactattccactgcaggaatcccatgctgcttccattctcctttcgtggacattctggattgtttttcactgtatctattttacaatctattggagaatatgagctggagcttgtcagcttgaacttgtcattttccaatgaggagacctggagattaggggtcacttagccaatgtcacctgggaagtcacaggctgagctgggataagaccccagtttcttgacacacagctctgtgattccctctccctccgcccataaagggcagaaatacgaactcctgagctttctcggcaaccaagtcctcttattgggcttatggacatgtccgcttatggacggaatcctgactttccctcgccccaagtcagcaggtcacagagaacccaagcagcctctaagatgtcataggtctccctcctgacctgcaataatggcaagaatcaatgtgtcagcggctgcttttcgtcgtgtgcttccgtgagccagactttgcaccaagggcaaatgtgttattcaccctctcagccctgcttccttgtctgtacctcgggaagcaattcagtcccctccccagttatcactccccaaagcagcgcgtagagttctcagagggccgctgcagaggagggggtcgactttgctgagtcgaagcccttcatcataagggcattatcaggcggcagtctgattagaatcacaaatgcctggctagggtagatatgggaggaggggctgattctgtgctgggaaggtgggagtggtgcgggatgcttacccaggtgtggagtgagcccctgggtgggctgcacagggggatggacagagctttaaaatactcagtgtgggtcagaattgcccatcaagatgagagacactaggcgtggtggctcatacctgtaatcccagcacttagggaggacgagggaggaggattgcttgagcccaggagcttcagaccaacctgggcaatatagtgagacccccatctctacaaaaaatttcaaaattagccaggtgtggtggcgcaggcccatagtctcagctgctcaggaggctgaggcgagaggattgcttgagcccaggaggtcaaggcaacaatgagctataattgtgccactgtactccaacatgggcaacagagtgacactctgtccaaaaattttaaaaaaaggaatattctttctaatgagctttctttccctttgtctctctcttctttctttctttctgaagcacgatctcagctcactggaacctccatctcctgtgttcaagcaattctcctgcctcagcctcctgagtagctaggattacaggtgtgcaccaccacacctggctaatttttgtatttttagtagatatgggatttcaccattttgcccaggctggtcttgaactcctgacctcaggtgatcctcctgcctcggcctcccagagtgctgggattacaggtataagctaccacacctggctaaattttgtatttttaatagagacagagtttcaccatgttgcccaggctggtctcaaactcctgacctcagctgatcctcctgcctcaacctctcagagtgctaggattacaggcgtgagccattgtgccccgccttcattctaattttgaacatgcattcccatgggaaataatctgatcacaaaatatgttagaaacaacataagaatcataaagttgtttcttccaatacacagtttatgtataattagttcttccatggcccccgctgcccctggccttcccagatatttacttatcacccactcaatgccagatgctgccgcagagatccaagttgagtaagtctctgctctcagggagagagagacagtcatgtccgggggtggtacagtggctgcgagtgctgtgggcagagttggaggaaccaaagggcggggaccaaatctgtgcagaggggacagcaaatatttgagagtgaaggggccacttgagcaggatgtggaagacgagtaggtggccctcagggaggcaggggtggggaggggagtaggcattctagactttggtgggctaaaggcccagatgtggagagaggcatggctcagcctagggctcaggggttcaggagcgcagggagatccttgcagaaggcctggtgggctcggtcatggagtgggctttgtcccttccagacctcagtccacactgcctttcttttttttcctattttttttttttttttttttttttttgagatggagtctcactctgtcacccaggctggagtgcagtggcacgatctcggctcactgcaacctccacctcctggattcaagtgattgtcctgcctcagcctcctgagtagctgggattgcaggtgcccgccaccactcctggctaatttttgtatttttattttattttattttttgtttgtttatttgttttgagatggagtttcgctcttgttgcccaggctggagcgcaatggtgcggtctcagctcactgcaacctctgcctcccaggttcaaacgattcttctgctttagcctcccgagtagctgggattacaggtgcacatcaccatgcccagctaagttttgtatttttagtagagaccgggtttcaccatgttggccaggctggtcttgaactcttgacctcaggtgatccacccaccttggcctcccaaagtgctgggattacagacatgagccactgcgcccgacccacaccgccttccttccttcacttgttcattcagtaaataccactgatgtgggccctgcgctaaacccgaacgaggggtggggagatgcggagacgggagttcaagggcctgtggtctctctgcaggctgcagttacacgggtcaggtggacagcagcacgtctgcacaggtgtgtcccgtgtgaggctgcatttggctggaagttgtcaccgagtccctggcttggggatgattttgcagacccagggatggcgctgtcataccagctctttgcagaactacctgcctggagaaggcataggggtaaggctttccctgatccttcaagccgtctggacagtggagaccagccccagaggattgtagaacatgacgaggcctttgactctgcctgcctagcctcccagtcactgggcttctggacaagaggcagcactgctctgagcttcctaccagtgatgatgagggtgatgatgaaagctatgtcagcgggatggtctctaaagcctctcccagctctaatcctgccaggaggaggaggaagaagaagaggagcaggaggtggaggagaaggagaaggaagagaaagaggagagaaggaagaggagaaggaggaggaggaaaaggaagactagaagaaggaagaggagggggagcaggaggacaaagagaaggaggaggaagaggaagagtaggaggaagaagagaaagaggaggaggaaaaggaggaggaagaggaagagtaggaggaagaagaggaaaaggaggaggcagaagagggagaggaggaggtggaggaggaagaggaggaagaagatgttggaggctgaggaggaggaagagtaggaggtagaggaagaggaggagaaggaagagaaggaggaggaagaggaggaagaggaggagggagaagaggaggaggaggaggaagaccctggagagggatggaccctgcagcaatttcccaactgggccccaacccaggacaccacctcttgtctccagcggaaagctgcaggatctggtggtgtcgaagccacgtttcctctctgcctgctgggggttacgtgaactgccaaaaattcctaccttgaaaggtaggaagaaatgtcagacttggaaagaaatgatccaacataaaaggcagacttcattaccagccgggtttatttcattctcccctggattcggagtggcttcaaattctcccgggcctgacctttgcaggggaactgaggaatttctcagagatgccaagacagcagtgtgtggcgggggtgccaccggctgccggacaattagtcccagagcctggtcctttggaaaaggtgttctgctggtggagactcgctgggctgtgatgtgatcgtgtcggatgccaaattccacagtcagtccctttcagcagtcacattccttagattcttatcagggattttcccccccaagtgaacactgggaaccagcctccccgctgattgcaggaggatgggaggaaattaaaagcaggaatcctggcggttgtcctggttcgtcaccagcttgccgtgccagcttgagcccttcccttcccctttccccttctctgggcctcggttttctcacctgtaaaaagggggttggggcgggatgatctttccaaggcctctggctgtgaaaattctattttctctttcttttcttctttctttctctttttctttctttctttctttccttcattcttttttcttccttccttctttcctttcttctctttctctttctttctcccctcccctccctcccttccttccttccttccctccctccctccttccctccctcctttcactgcttcctttcatttctttctctctttctctccttctttcccttccttcctccctccctccctccctcccttgccccctttcctttcctgtcctgtcctttccctcctctcccctctcctcccctcccctttccttttctttctttcctctatctttcctcttcctttctttgacagggtcttgctcttttgcccaagctagagtgtggtggtgcaatctcagctcactgcagccttgacctccggggctcaagagatgctcccacctcagcttctcgagtagctgggattagtcacgtgccactatgcccagctaatttttaaatttttagtagagatggggtctcgctgtattgcccaggctggtctcaaattcctggctttaagcaatcctccctcctcagcctcccaaagtgctgggattacagtcatgagccactgcgtgtggccggcaaagtcttaataattctccattcaagtccatagagagatggtttcaggggacaatagacctaaacaaaattctgtcttcacagagtgggagatgcttgtgggacagttgctgcagtgggagattaggagtgggggccttcttgtgtgtcccctccttcatgggggagcattcctccccctgaaatggtgcagctctactaagtctctactaaaaatacaaaaattagtggggtgtggtggtatgtgcctgtaatcccagttaattgggaggctgaggcaggagaatcacttgagcctgggaggcagaagttgcagtgagctgagattatgctactgcactccagcctgggagacagagtgagactctgcttcaacaacaacaacaaaacaaaacaaaacaaaaaaactttttgtagagaccaggtcttgctatattgcccaggttggtcttgaactcctggcctcaagtgatgctcctgcctcgacctctcaaagtgctggaattgcagcatgaaccaccgtgcccagcctaaaccatcttttcaatggcagtcctcttctcttctgttggcccacattttaaaacagcttttatgagagtgccatttattcagaaaaaaagactccaggattatcctggttaaatttcagattaaagcctgatccaggccgggcacggtggctcacgcctgtaatcccagcactttgggaagcctaggcgggcaggtcacttgaggtcaggagttcgagaccagcctggccaacatggtgaaaccctgtctctactaaaaatataaaatttgccggtgtgctggtgggcacctgtagtcccagctacttgggaggctgaggcaggagaatcgcttgaaccagggaggtggatgttgcagtgagccaagatcatgccatagcactccagcctgggcaacagagctatgcaagaagagaagctgtgtccttatttctggacacagttgtgtgaggttgtgaagcctggagcggtggcagccatcttagagccatgaggcaagacagcctggggaaggcagagcaggaggcagggtctttgactgtgtgatgctgcctaattagccaactctgcagccactcacttctcaatatgtgaaatcttaagtgacctggttgttcaagcccaatttatcagtagggtttttacaacgcatctgaaagcatcctcgccaaaacaacctgctgtcaaaacatactatcaaggcgtgagaatgtgagaccgggagacacttggtgtcctggttgcaccatttaccctccccccccaaatggctttgggcaaatctcaatgccacaacctcagttttccatctacaaagtagcagttcaccttcccaggggagccagaagtcccaaagacaatagcaccgatatgaatgtaaatttgtggactgcaaacttctaagcatagcagatgttaccattaaactataaataggccaggcacagtggctcatacctggaatcccatctctttaggaggctgaagtaggaggattgcttgagcccaggagctcaagaccagcctaggctatatagtgaatctccctgtctctacaaaaacaaagtgcgaaaattagctaagtgtaatgatacgcgcctgtggttccagctacgcaggaggctgaagagggaggattgcttgagctcaggaagcagaggttgcagtgagctgtgatcatgccactgcaccccagcctgggtcacagagtgagattttgtctccaaaataaataaataaacaaataaataattgtactttatgggccgggcatggtggctcatgcctatgatcccagcactttgggaggcggaggcgggcagatcacaaggtcaggagatcgagaccatcctggctaacacggtgaaaccccgtctctactaaaaatacaaaaattagccgggcgtggtggcaggcgcctgtagtcccagctactcaggagaccgaggcaggagaatggcgtgaaccccgggaggcagagcttgcagtgagctgagatcgcgccactgcactccagcctgggtgacggaacagagcgagactccgtctctaaaaaaaaaaaaattatactttataatgaaaatataatcataatcctgaactagctctatctcttctggtaaggaaaggagacaagactttttacccacatggtatctacatttttttttttttagagacaaagtcactgtatcacccaggccagatcgcagtggtacaattacagctcactacagccttggactccttgggctcaagtgatcctcccacctcagctccccaaattggactacagacacaagccaccatgcccagctaatttttttttccccaaatgctgatcctccctgaatgctggtcctccctaaatcctgattgtccctgaatgctgatgcttcctaaaatgatcctccttaaatgtgctcctccctgaatgctgatcttttctcacgtggtcctccctcacatgatcctccctaagtgccgaccctatagaaagcgcttggcaccatctctccccctagcctgttccctctggccctcctattaatggcggtagttggggatcactgctgaagtgctcaaaaccacacagcctgcttggccaaatcacatacttctcagctgccccctccacatggaaaactcaatccatcagtggccccgccagcccttcccgccagtgcgcaggcaaggagccgatgctgcctgtggggctggctctcaggtggggtgggccccaaaattccccaccgtggaagctgctggagaataaatgcagataacgaggagggaggaagctgagaggctggtggcacggccgtgctccgtggagtaggtcgtgcactcccggagcccctctccctcctccccggatggaaatccacacaactcctttgcccttcagacctccgtgctgcgccctggaaaccatgtcatcgcctttgtgtttttgcaaaaagatttggtcagtcgccatggagatttcagatcatcttttccctccaaaaatcaatgaccttaacttttcaattccttccctgcggtgcttcgaaatggacagttccagtaaaaactattatgaggaaacgcaggcaggtctatctgctatccaaacactcctactgttttttgtgcccgaaaaactgatcaggccatggtgttacatacactcggctattcctatgtgaacaaaaccaccactccctgcggtgttgaggcggatgagtgatggacaggaacagcagcctcagagacactcattttgctggaagggatgacccgatttgtgccaatttgctcgatggcagacagatgatggagaagtgctctcagggggctgttggggggctatggccatgagcaccttcatggactgtccatttacccccactgggctcagcttccagcttctgcctctccatcctgccccagcaggtactcctggaaccccactctgagttcccttctttaaaaactttccatgtgttggccgggtgcagtggtgcaggcctgtagtcctagctacttgagaggtggaagaatctcttgagcccaggagttctgagaccagcctgggcgacatagcaggaccccatctctgcaaaacatttcttaaaaaaatagctgggcatggtggcacgcacttgtagtcccagctacttgagaggctgaggcaggaggattgcttgagcccaggaggttgaggctgcagtgagctagaattgcatcactgcactccagcccgggcaacagaacaagatgctgtccctgtaaaaaacaaacaagaaaacctcatcctactttccacgttttcacctcctcttttccaatagggtgagtctccaagctcctccagagccaacatgtctccaccttccacccccatcgagtgggtatcctgctcgccccttcaaggatggggtatctactccacccactgtgggcagcccattgcacttgtgggcagctcttcctggcagcgggtacctccttatcctgagtgatgcctgtctcccagcagcttaatgctctgacctgactccatgccctctggggccatgagagcaagtctggtccaactcccctacaggatgttggggcagaaagctggctgccttcaccatggccctccgcttgtctctgctcgatattcctgaggaacctgtcctcaacagccctcacctgttcttctagagagggcaggtctgagcctgaggagccatgggacctccttttcacctggccaaatcccgggtgatgacttttcttcccatggaagctcacggctctaactctgacatcagcctcccctccctcccagctcaatcaccttctgcttgtaggacagtggccatagatatctcctcccggggctctgggtggcagtttctctgcatttctattgaacctcatggcagacacagggagagtcctcagtgaggtaggagatgggatttgactctggaggtggggtgcagacactggaccaaattgaggactagctaaaacagggaagaggtgaaagcacctctccataaaacataccccctagcaccataacgatttaccattgccatggcaacacccagaagttacagcccctttccatggcaatgacctgataacccagcagttagcaccccttcaaagttatcacccggaagttaccacttaatcatatgcaaattaaggggcgggttatacagaaattatgaataacctgcctgttaatttgcataccattaagatgggtataaataggagtgaagctctacctctgagctgctactctgggcacactgcctgtggggtagccctactctgtaaagagcagaacgtctgctgctgctgtgcactgctgctttgataaatttgctaataccactggcttgcccttgaattctttcctaggctaagccaagaaccctccctggttaagccccaacactggggttcacctatactgcatcagtggaagaagattctgagccagagtctaacatggagggtgtttattagggatggcttttaggataaatccctggggaagggaggggactgaggcaggaatgagcagaaggagacgagcctccatataggccaggacagctgccccagaccccatgaggctctgcagctgggatgctctttcagcgttgtccccaggcagggatatgtccaggcttttcaagtgcgcctccaccagtcacaggatggagggtgccccaggaagagctgggaccttggatgaggtgactctgagcagctgaatgatggatgtctgttgacagcacttcctgtagctggggctaaaagcctttctcaatgcaggggatctgggtggcacagcccaacatctaccacaagggctggtgggcatggaggggaacaaggtgtgttcctgatgctattttgctagtaagacagcctgggatggcctttgatttgtagaggccacaactctgttgactcatgctgaacttattgttggcaagaacctctacatcccatctgaggcttgtcctctgggctctggggctgcagtgcaggacttcatatttgcctggttgtatttcatgttgttagacttggctccttgctgcggctgtgcagatctagcttggatcccaactctctcctaagacccaggcccctgtctctgctggctcctggtcttccacagttcccagcagcagtttactgcctccccagtcaaggtcttcctctcctagaggcatggcctcaagaagacagacagccacgtgccaagacccagatcgtctggctgtttagcaaagtgtctaagagttgcccgttgacttgttgttgccttggacatgttatttactccttcctgtgcctcagtttccttctctgtaaaagtagaataataacagtacttaccacccagatttgggtgaagatgatcaggacaccttgcttaggtagcagaatgaggaggggaagagaaaccactccatgcgcttggctggggtctgaaccacactcaactctcatctcactggtttcaaacaggagtagggatagttcctcctccttgctatttttcctggtccttgagggatatgggtaagaaggacctatgaggggatattttatttgctctctgattatccacctgttctcattagcaaagtggatggagcatggggttgggaatgagaagactgagtttcaaggcataaatttactacatactcattctgtgacttgtggtcttctctggagtttcttatctgtaaaattcctgcatgtcacattgttgagaagaccgaacagaagaatgtacatgtattcatttgccagggctgccatgccaccgactgggtggcttaaacaaaagaagtttatcttctcatagttctggaagctggaagtagaagctggaagtagatcaaggtgtgttaccacctgatcagggttctcacccaccatgcagatgcagccaaaatactgaaacagcaggtgttgcagcagagaaagcatttaattatttcaaggcaactgagcgaggaggacaggagatagttctcaaatccaccttcctgagatttcagaggctagggtctttttttttgagacggagtctcgctctgttgcccaggcgggagtgcagtggtgtgatctctgctcacagcaacctccacctcccgggttcatgccattctcctgtttcagcctcccgagtagctgggactacaggtgcccaccaccacgcccggctaattttttgtgtttttagtagagacagggtttcaccatgttagccaggatggtcttgatctcctgacctcatgatccacccgcctcagcctcccaaagtgctgggattatgggtgtgagccaccgcacctggccagaggctagggtttttaaggttggtttggtgggcagggggctagggaatgggtgctactgattggttgggcatgaactcttaagggtgttaaaactatctttgtgcaccaagtccatttctgggtggtggagggtcatggattgctgggccagctggtgttcgttggttcatcagttcatctgaatgcaaactctaaaaagtattgcaaagaccagtcttaggtttcacaataacatgactcctgaatgctaagttattacagaagagcaaactagggaaaaatagtgggttcttgttttaccgtacctgcatcttagcaacttttggttgtcacaaaagaagttacatgactaaggatcattgttcttaagaaaagaagtttattaatcttgttggacagcctgcctgggactaggagaggaaggtagtgaattattagtgactactgtctgttgaaatgactgtacatgtaatcatgcataaaggatgaaaaggtcagagagaaaggaaaaaatatataacaaacatcttatgattgagttctcccgggttcaagagattctcctgcctcagcctcctgagtagctgggactacaggtgtgcaccaccacgcccggctaattttggtgtgtgtgtgtgtgtgtgtgtgtgttttgagacggagtcttgctctgtagcccaggctggagtggaatgtcacgatctcagttcattacaacctctgcctcctaggttcaagtgattcttctacctcacccttccagagtgctaggatttcaggcatgaggcaccacacccagctaatttttttttctaatttttttttgtagagctggggtcttgctacgttgcccaggctgggcaaaccttagttctaacagagcttcttgaacacagttggcaggcaacctcactggcactggcctttctgagggattgggcaggtgtggccaggtaattagaacagtgagggcaggtgtggtgctggggagctgggcctgaagctggacacccccaaccttgagatggctcagatcctgctggggctcaggtcctggcacagaccacagcccagagcagctgctgtggttgagctgagtgactgtggatgggagggctccttctgggatgcaggggttggggtcggagcaacagaactttaccaggcctgccctgtgtccgccgtcttcaggagctgggagtcttcccataggacgaaggctaagacagaggcatacaagggggccctgtgggacaggagaacctttcctggctggagggtcagggaaggctcgcgggagggacacggccacgtctgtgcttgagagcgcgccctctggtggtagatagaggagactgcaggctgggagggcaggaggggccgaggttcaggaccaccatgggaggggcgtcaggacacggacttgcaggcacggtgcctaattggccgtaaggaggcagggaagggagggaggaaaggagaaggtggagtctgggtgatttgctcctggtaaggaaacggggaacttagaggtgctggcctccaagctggaggagcaagtcggggttgaatagtgatggattcagttggattggacaggttggcattgtgtgtactgcagtgtcctgtgggacatgacggtgtgtgaccactgtctaggcaagcaggcaggcacagtggtgactcaacagggggccaggacagagctcaggatgaggaagtggggacagactgtgtggttctggtggaaaggaggggggccctggcaaggccttggggccttgcagaattgcttgagcccaggaggtcaaggctgcagtgagctatgattgtgccactgcactccaacctggacaacagaacaagactccattccaaaacaaaacaaaagaaaaaacaaaagccctggtctctgactcaggctcgggactcaagtgtcctggggagggaggggacgcatgagatcaaccctcaaagcaaagctcagttaggagcactggggcttggaaggccaagcctgaggctggggtagaggtggtgaggtaggaggtggaacttgactccaggggcagagcttggacaccagaccaaattgaggactagctaaacaaaacagatcggggcagaagcgcctccccataagacatgcccaccagtgcgccatgtcagtttcccattgccatgacaacaccaggagttaccacccctttccatgacaacgacccaacaaccctaaagctaccaccctcatcctggaagtttacgcataaaccacccccaatttgcatacaattaaaagtggggccggcacagtggctcatgcctgtaatcccagcactttgggaggcccaggcgggcagatcatttgaggtcaggagtttgacaccagcctgattaatatggtgaaaccccctctctactaaaagtataaaaattagccaggcgtggtggtgtgcacctgtaatcccagctactagggaggctgagacaggagaaccccttgaacctgggaggcggaggttgtaatgagccaagattgcatcgctgcccttcagcctgggccacagagcgagactccgtctcaaaaaaaaaaaaaaaaaaaaaaagtgggtatagatatgagtgcagccctgcctctgagctgctactctgggcacactgcctctggggtagccctgctctgcagggagcaggacctctgctgctgctgtgcactgccacttcaataaaagttgcaacaccactggcttgtccttgaattctttcctgggggaaactaagaaccctccctggctaagcctcaattttggggctcccctgtcccgtgtcaccagggcaatggggggaagaggctgcttcagcagcatctcttagggcagcaggcagcctcggagaggggttgactggtcacattccgagatgggcatgaacctgggaagtgtcctgaagatctctctatcgcatcatgacatgatttcctgaaatcacttagcacttgttttctctattaaccgccaattaaggatttgatggctcagccaagtcacagagccaaacgcctggtggggtgaaagtactgtgcaagcaagccttgagctggtggtggctcgggacggtttgattgctcctccccctaggtgaagtgggccgcctcttgcaagaaaaagagacttgtggccgggcgcggtggctcgtgcctataatcccagcactttgggaggctaaggcaggtagatcacttgaggtcaggagttccagaccagtctggccaacatggcgaaaccagtctctactaaaaatacaaaatattagccgggtatggtggcgggtgactgtaatcccagctacttgggaggctgatataggaaaattgtttgaacccaggaggcggaggctgtaatgagctgagatcatgccatcgcactccagcctgggccacaagagtaaaactccatctcaagaaaagaaaggaaatgaaaggaaaggaaagaaaaagaaaagaagaaagaaaagaaaaagaaaaggagacttgtttgggagcagatccgtcctcaagacctttgctaggagtgagtttactgtcttggaccctccctgagtgctcagctggggagaagggaagggaaatgaggaaggaacattgctgagatgatgcccagagataatgccagtcccttgccatcctgatggaggctgccgggagtgtgttcatttcttggcagttcgaggaccaggcctgccatgtcccagttctgtcctcctgggtcagtccttccaggagggtcgtgaaagggacatgtgtctcctgctaagcacctttctgggtgcagttattttatggcccccagagcactgttcacccactgctgtgcacccgccatagtcaggagctgaggtgcgcaggtgggcggtggcaggacgacaccaccagacagcagacagaggcagacaaaacactcaggacgcagggatcctaggggcaaggcaatgggggtccccacaaccgcggctacctggggatgcacaggctttagagctccatctggaaaggcctggagccctttccttgtctctgcctcccttcttcgttgtttttggccaagttttgatttttggaagccatttccagcccatttaaagaccaaatgttatggggacggtgatttgaggtatttggaaatgttttccaattcacagctcatttctctatggaaagccctgactcagtgtggttcagagatgctggacgacggcctgtctgttctagaaccctcgggcggatctcaggatcccacattaaaccatcctgaggaaagtcacctctctctctctctctctctctctcgctcgctctcgctctcactctgtgtttgtgtgtgtgtgtgtgtgtgtgtgtgtcggagtcttgctctgtcacgctggctggagtgtagtggcacgaactcggctcactgcaacctctacctcccgggctcaagcaattctcccgcctcagcctcccgagcagctgggatcacaggcacctgccaccacacccggctaattttttatttttattagagacgaggttttgccatgttggccaggctgatctcaaactcctgacctcatgtgatccgcccatctcggcctcccaaagtgctgggattacaggcatgagccactgcgcccggctcacctttctttttggaaacacacactgagtgcttgagctggagctgaggctttccagtagaatcaaaggaagggcctaggctgctgaagtctcccacagtttcaggacctttttaattggcagaggtggaattcacagtttgtactgggtaggtgggatcccgccagtcctcgggtcaggaagactagactccctttgcagctcagcctgtggtttgagctgtagctatgggcaatgaagtttaacctcttagactttcttttccatctgcaaactaggactgtctttaagctgttagattcctttgtagggtttaagtaaccagttgattaagaatgatgccttgattttggtaatgctgcatgatttacacactactgactgggatgtgttcatttagtcctgatcataaccccccccctttttttttttgagacggagtctctctctctgtcgcccaggctggagtgccgtggtgcgatcttggctcactgcaacctccgcctctcaggttcaagcgactcttctgccacagcctccccagtagctgggattacaggcgccctccaccatgcccggctaattttttgtatttttagtagagactgggtttcaccatgttggccagactggtctcgaactcctgacttcagatgatctacccgccttggtttctcaaagtgctgtgtttacaggcgtgagccactgtgcccagcctcatcataaccttaaaagttagattttaaatataactgaggctcagagaagggacatcactctgcctaagtcatacagcaggtttgtggcagaacctggttttaaactaggtttcctggtgcctgtgagaagagggctcaacttttcactactttcccttttcttccatgtttttgttttgttttgttttgttttgagacagggtctggctctgtcatccagactggagtgcagtggtgcgatcatagctctctccagccttgatccctgatctcaagcgatcctcctgcctcagcctcccgagtagctgggaccacaggcatgtgccaccatgcctggctaatttttactttttattgtatagagatggggtcttgccgtgttgcccaggttagtctggaacttctgggctcaagtgatcctcccacctcagccttccaaagtgctgggattataggcgtgagccactgcacccaacccctttcacgtatttttgagtgtgctagtactggtaatatgtattttcctagaaaattgtccagtagtcaggatttttgaaattttttgatgtaagattatacctaatatttgcttatacatttaaatctctatatggaatttttttttcttgttcttcatgtctattaaacctgagtttagcagggcatggtggcacacgcctggaatcccagccctttgggaagccgaggtgggacgatcacctgagcccaggagtttgagaccagcctgggcaacatagctagaccctgtttctacaaaaatgcaaaagttagccagcatgttggcgcacacctgtggtcccagctatctgggaggctgagatgggaggattgcatgagcccaggaggttgaggctgtggtgagccatgatcatgccactacactcctgacctcaagtgatccacccacctcggcctcccaaagtactgggattacaggcatgagctaccacacccagcctgaactcatgtctttcttcagctcttgtaaattttcttgttatttcttcaagtacatgcttctctttgttcttttttgatcatgccttccagagctactactatatagatgttggtccttggtcttcctctaggtcccttgttgcctgtttctgcctgttttccatctccttttctttttgcagtggctactgggaaaggtcacagcttagatttgcagctcatcggtttgccctttagctgtttccattctgtttttcatagtcatacatttcacttctaagataatgcatttttttaatttcattttttttgtgtgtgtatgtcacagggtcttgctctgtcacccagtgtggagtgcagcggtgcgatcatggctcactgcagtctcaaactcctgtgctccagcgatcctcctgcctcagcctcctgagtagctgggaccacaggcatgtcagggaccatgcctggctaatttttgtatatttttgtagatacagtgtttcaccatgttgcccaggctggtctaaactcctggggtcaagctatccacccgcctcagcctcccaaagtgctgggattacgggtgtgagccaccatgcctggccagaattttttagtgagtgatacattgtcttatttctttgaggacattaattatgctttaaaaaattatctccatctatttgctttactattttttaaggggatgtgatttattgcctgttgagttggtgcctttcttccatgatactggccttttttcctcaaataatttgaaagtcttggtatctggggttttccattagcttgtttctgtttcctgagaatttgtctgttggtgggctggaggtatggatgaagaatgggaaacgagtgtgtaagaattcatttatctgtctgactttgagagtgaccctgtttctcctggaggtcacaagcttttttttttttttcttttttccatcccccaagactgaaaggtcaccagtttttgaggtcagccagcacccactcctgtgaccatacctaccttaggacaggtgaatccaatgcctaatatcttttttttttttttttaaatagagacagggtctcgctctgtcacccaggccaaagtgcagtggcactatcatatctatgtatctctacatatctatagatacaggtatatctatatatctagacatagatatagagatatatctctatatctagacatagatatagagatatatctctatatctagacatagatatagagatatatctatagatatctatatctataatatatttatatcttgagatggagtcttactctgtcatccaggctagagtgcagtggtgcgatctcggctcactgcaacttctgcctcctgggttcaagtgattctcccgtctcagcctcccaagtagctgggtctacaggtgtgtgccaccaagcctggctatttgtttttgcatttttagtagagacagggtttctccatgttggccaggctggtctcgaactcctgacctcaggtgatccgcccactttgacctcccaaagtgctgggattacaggcatgagtcaccatgcccagtcgtatatatatactttttgtagagacaaacaggatcttgctatgttgcccaggctagtctagaattcctaagctcaagcgattctcccaccttggcctcccaaaatgctgggattatgagtgtgagccaccgcactcagcctccaatgcctgattcctgaaaccagcagggacaaggacccgggtcctacctgtccagctctttctatggtggtcccctaaccaatctctctgatggtcacctttgggtccctctctacctcctcatctgcatctgtgcccccatgtggctcctagcttcagccccggtcctcttttgtgtgtttctggctgtgatttttgccttcaatgtgggcccatctactttctgtctcttagggacccctccaaatgtctggcccattgcttctctctttccaatgcccttgaggactttttttcttattttattttattattatttttagacagggtctcgctctgtcacccaggctagagtgcagtggcatgatcacagcttactgtagcctcaacctcctgggctcaagtgatactcctgcctcagcctcttgagtggctaggactataggcgtgtgccaccacaggtaatttttaaatatttttgtagagatggggtctcgctatgttgcccaggctggtctcaaactcctgggctcaagtgatccatcctcctcggaccccaaaagtgctgagccaccacccggccagggacttattttttaattttcaatttctaggctatggggatgggaggaggaggtgggagcaccttaacctgatcccgtattgtttgtgtacgtcccttcctctttcctcctctccactgcccaagcttgctgccccttgcttcttgtactctgaaggcatttattccctagcccggcaggtcacatgtctcttcctttctcctggctcctccccttccttcagccttctggctctttctttctttctctctctctctctctctggctctttcccttcctccctccctccctctctccttctctctctctttctctctcattcctcctcccctcccctcccctcccctcccctcccctcccctcttctcccttcctctcctcctctcttcagggtttcactctgttgcccaggctgtagtgaagtagcatgatcatagccactatgatcctgggctcaagccatcccctgccccagcctcctgagtagctgggactacatgtgtgtgccaccacgcctgggctaattttttaatttttattttgtagaggcagggtctcactatgtggctcaggctgatcttgaactcctgggctcaagagatcctcctgcctcagcctcctaaagtgctaggattacaagtgtgagccactgtgcctggcctggccacttcccattgcaggcaagtctctagacttgccgtggtctctctccgctctgtgcctgttacaccgctgcttcccctgctggcttcgtcccctctcacggcccccacacattggtcagttggtcggttggtcggttggctaacttatcttgcactactcagctggtggcctcagggcctgctgggcgagatgccctgctccgttcctgtagcttgtgtgttcaccacgtggtggaacgtgttacctgctgttcctatggactgtgtcatctcctctccccaccagggtgagatttccacgggcagggctgagtctttctcaccaattccacactgagtggtcagtgacgggaatgatgccagggcttggtggccaagggttgcaagtgttctctcttcccctcagaccgagacagagggtctcagtgggccccccatccaagagagcgagcctccaccccaggtttgcgggggcccctccctgtccagcacggccccctgacccgaagttggcagctctgggaacaggcagggctcatgtgactgttgctctctccacaggcactggtgccatcacacagtgacacggacggtgtcctgccaggtgcagaatggctcggagacggtggtccagcgcgtgtaccagagctgccggtggccggggccctgcgccaacctcgtaaggtaaaggccgctgggctaggctgctctgcccttccctcccattccctcggacaaaaccagtcccaggatggctctgggagaggctgggctgtgctcacagacaaaggctgagcatgcatttatggagcaccttctgtatataaggcatgggtgtgtgtatatagggtatatatgtgtgtgtgcaaagatgtcagagacatgctcctaccgcaacagaaccacacaacccagtgggtgtttgacagacagaagaccaccacagatgagtggggtatgggatccgaggtcggggaaggccaggtggggttgaagagggaaccaaccagccttatggctccaggctggaacgaggggctacaatgaccttggaaatccagcctgtctttggccccatccatcacaggcctcgcccctggcagcactgccccactcaccaggcatgtccctctcactggccctacttgttactggacctgcccctcacgaggcctgcctttcaccagccctgaccctcatgagccccacccttcaccagccctgcccccaccagccttgcccctcaccagctctgcccctaccagccacgcccctcaccagccacacccctcaccagcccctccctctcaccagccccgcccatagtcagcccttccctctcaccagcccctccctctcaccagcccctccctctcaccagccctgaccagaccacaggcttcagggactcttcagcatccgcagagagatcttgctgtcagacaccagcattcacggtctccaaagttccaactctccttcttttcccttcttcctcctctccaggccgtgcttagctccagggactggcttccccaaaccactctccccacagcctgcccagcctggggcctctaccccaagcaccgtggagccgctgtcctcaaactccaaatcccttcccctcctttgtgccctccctaacgggacattttgcctgggtcagggttctccagagaaccaataggaagggatgggggagagggagagtgggagagagattgaaatggtaaggaattggcttgtatgattatggagactggcgattattccaaacctgcagggtgggctggctggctgagacccagggaggagagctgatgttgcagcttgagatgggctggctgctggtcaaatgcctccttcctccggggaagtcagtctttttcttaaagccttcgactgattggacaaggcccacccacattatagagggcaacctgctttactccaagtctactgatttaaattaatcttggctgggtgcggtggctcatgcttgtaatcccagcactttgggaggatgaggcgggtggatcacttgaggtcaggactttgagagcagcctggacaacatggcgaaacccagtttctactaaaaatacaaaaattagccaggcgtggtggtgggcgcctgcaatcccagctactgaggaggctgaggcaggagaatcacttgaacccaggaggtggagattgcagtaaaccgagattgcgccactgcactccagcctggaaaaaaaaaaaaagaaattgctacgtctcatgactggtgatgttaactttgatcgcttgcttatgatggtatctaccaggtttctccactgttgcataattatctttccctttgtcttttacatgtatgttgtggggagacattttaaacctatacgaacatcctgtttctcatcatactatcatattgcttgcaacagttaatgctatggtgtttgccaaatggtgatttcctattttcattcttctttaatagtagagatgcttcacttgagacccctattgcatacaagtgttttgatacaggtcattctgcaaggggaatggctaggtaaacggaatgtcattcattttcatttttattagaaacagctgcttttgccagttgcggtggctcacgcctgtaatcccagcactttgggaggctgaggcaggtggatcacctgaggtcgggagttcgagactagcatgaccaacatggtgaaacccagtctttactaaaaatacgaaaattagccagacgtggtggtgggcacctgtgattccagctactttggaggctaaggcaggagaatcacttgaaccgggagaaggaggttgcagtgagctgagattgtgccattgcactccagcctgggcaacaagaacaaaactccatctcaaaaaaaaaaaaatgctggttttaaatgctatactagagagatggcagtgggtccaaaatgaaaaaaaaaaaaaaaaaaaaaagctttttccttttcagcagagggtacagacactccctatcccctgccttccccacttccccaggagctaaattccaagactctcctgcctttctcgtcagcagggagtttcagattaccaggtcatggcctcttgatttgggaacagcttctgagaagaaaagtctttgaagtctgatctgtctgtgaccctgacaggctgggctttggctcagagctctgttggagaagtggctgtcctactctttctttctttctttttttttggagacaggatcttgctctgttgcccaggctggagtgcagtggtgcaatcatggctcactgcagcttccaattgctgggctgaagtgatcctcctgcgccagcctgaatagctaggactacaggcatgcatcaccgtgcctcactaattactttttctttggtagagacaggggtctcgccatgttgcccaggctggtcttgaactcctggcttcaagggatcctcctgcctcagcctctcaaattgctgggattacaggtgtgagccaccatgcctggtctcaacaagttaaagctgttacactatcaaaacacaataacgcagccgggcacggtggctcacgcctgcaattgcagcactttgggagtctgaggcgggtgaatcacctgaggtcaggagtttgagaccagtttggccaacatggagaaaccctgtctccactaaaaatacgaaaattagccaggtgtggtggtgagcacccgtaatcccagttattcaggaggctgaggcagggagaattgcttgaacctgggaggcagaggttgtagtgagccaagatcgtgccactgcactctagcctgggcgacagagtgagacttcctctcaaaacaaaaaccaaacaaaaaaaaagaaaaatacaataatgcacctataagaaaagctggacaagctagcgcctgaatcactgacctggactgaaaatttttcaagtgatcattaatgttgcatagttgttctctcctttaccacttaagtaattatctgaacaatgtttcagaagtgctggggtccggcccggcgtggtggctcacgcctataatcccagcatttttggaggataaggtgggtggatcacacggtcaggagtttgagaccagcctggccaatatggtgaaatcccatctctactaaaaatacaaaaaaattagctgagtgtggtgccacatgcctgtaatcccagctacttgggaggctgagggaggagaattgcttgaacctggcaggcggaggttgcagtgagccgagatcgcaccaccgcactacagcctgggcgacagagtgagactccgtcgcaaaaaaaaagaaggaccggggtcttcgatgtggtgttcactgactttccagggagttcttctcactcactccttggagttcggaggccaaaacagaacattcagtcagggctgacatgaatttgtcataagtctcccctttgcctataacatataactagtgggaaccttgctaattaaaacaatttggccagtgacagtggctcacacctgtagtcccagttacataggaggctgaggcaggaggattgcttgaggccaggagctcgagaccagcctgggcaacacagtgagacccaccccatttttacaaattttttaaaaaacatcagccatgggttgtggtgcgcacctgtacttgggaggcttaggtggaaggatcgcttgagcccaggagttcgaggctgcagtgagctgtgattgtgccactgtactccagcctgggcgacagagcgagaccgtgtctgaaaataaataaataaatacaataataaaacttaattttcattctcttagagaaatcccaaattgctgatcttaattgtcataatttctgctgttattatattttactagggaatgggccgggtgtggtggctcacacctgtaatcccggcactttggggggccaaggagggtggatcacctgaggtcaggagtttgagaccagcctggccaacatggtgaaaccctgtgtctactaaaaatacaaaaattagccaggtgtgatgatgcacacctgtaatcccagctactcaggaggctgaggcaggagaatcacttgaacctgggaagcggaggctgcactgagccaagatcatgttgctgtactccagcctgggtgacagagcaagtctccgtctcaaaaaaaatttaataatttattagggaaggagaggttaacacagttttctttctcactagtaactcataaatgagctagaattgggtgcacaccctctgtctgtggccttggggctgctgtctgggcagggagaggcaagatgacaacaggttgcagcattatcctttggtcccctggggttccatatgcattcctgtctcaggtcctggttttgctggccttgcctatatgaagcatctggtttgtggcagccatctcactggtctccccactccccaccctgccccgctctagctccttctctccacagaagctggagggatattttattttattttataagggtcaggatctccctttgtcccccaggctggagtgtagtggtgtgatcatagctcactgcagccttgaactcctgggctcaagcaatccttctgcctcagcctcctgagtagctgggactacaggcacacaccaccatgcccagttaatttaaaaaaaattttggccaggcgcggtggctcatgcctgtaatcctataactttgggaggctcagatgggtggatcacgaggtcagcagttcgagaccagcctgcccaacatggtgaaaccctgtctctactaaaaatacaaaaattagccaggcgtggtggcgggtgcctctaatcccagctactcaggagactgaggcaggagaatcgctttaacctgggaggcagtgttcattccctggccgaattgctcatcgtctgcccgctctgctagtctgggagccttaggaggtccgggactgtctcattggctgctgtgttccccatacctggcttgcaggagatgaagcagcattactgaattgaggttaggttaggaggatgaaatcagatcagagatgtcagagaactctgggttttgttttagatggagtctcattctgtcacccaggctggagtgcagtggcgtgatctcggctcactgcaacctctgtctcccaggttcaagtgatcctcccacctcagcctcccaagtagctgggactacaggtgtgcatcaggacacctggctaatttttttttctgtatatttagtggaaatggggtttcaccatgttggccatgtcggtctcgaactcctgaactacctcaaatgatcggcctccctcggcctcccaaagtgctgggattacaggtgtgagccaccatgcccggcccccagtgcttcttagcataatttttttttttttttttggagacggaatgtcattctatcacccaggctggagtgcggtggcgtgatctcagctcactgcaacttctgcttcccgggttcaagcgattgtcctaccccagacttctgagtagctgggaccataggtgtgtgccaccacacctggctaatttttgtatttttagtagggatgaggtttcaccatgttggccaggctggtctcgaactcctgacctcaagtgatccacccatcagcctctcaaagtgttgagattacaggcatgagctgctgcgtcaggccagcataattttttagcatagtttttcagttttcttaagagtctgctgcaagagtctgcgtgctgggtagaattccctgagcgagcagagcctgggtgggaggaactcggaaggttcctgggagcactttgaggcagggtctgtcttctgcactggtttccccatggctcataatggcttgtgtcatcactataaatgacgttaccaaaagaagcttcaataacgggggaatattcacctcacaatctatctgggagaggcggccaggtctcagccatgaagatcctgggatcctttgactgaactctccacccacacctgtgtgtccaccatgaccttcctcaaggtcgcagaagggcagcagcagctccaggcatcacgtctcacaccacagtgtcccaaaaaagagaggaaggggatgggacacagttttctcctatcagagagtacagccttttccagaatccctagcagacttccctggatgtctcattggtcaacatttttcctctgagcctcagtttctccagggctaagatggtggtgatagaaggctgcctcaagaggttcttggaaggggatgtgaggtttgcaggggaaggtcctgcactgagccttgctgtaataagaaccctgggaatgcagactgaggccaaagtatgggtgagctatgaagagaatcagaagcaggtcccagcacgtcagccgaggcagctcccagcgggcagttctggcctaggcatgccttgatcttgcattccgctctctgaggttagggtggcaaaccccagctgggccctgtgtagccgccttgtgtggtactctgttgcttaccatcctgcctgctcagtgtgtcttgctacatttcacccccagcatttacatagaaatttgcaaatgtgtgtatttcttgtctgttccccctcatcatttacttatttatttatctttaagagagggagcctcactctgttgctcagactggagtgcagtggcacaatcatagctcactttggcctcgaatgcctggactcaagtgatcctcatgccttagcctcccaactgggtgccatgatggatggatgccatatgcctggctaattaaaaaattttgttttttgtagatatgagatcttgctttgttgtccaggctggtcttgaactcctggcctcaagtggccattccacttcagcctcctgagtagctgggactacaggtgtgtgccaccacacctggttaattaaaaattttttttggcggggcatggtggctcatgcctgtaatcccagcactttgggaggcccaagtgggcagatcatttgaggtcaggagttcgagaccagcctggccaatgtggtaaaaccccttctctactaataatacaaaaattagtcaggcatggtggcaggcacctgtaattccagctactcgggaggctgaggcatgagaatcacttgaacccaggaggcggagattgcagtaaccaagatcgtgccactgcactccagcctgggtgacagagtgaaactgtttcttaaaaaaaaaaaaaattattttttgttttagatatgggatcttgctttgttgccgaggctggtcttgaactcctggcctcaagtgatccacctgggcttcccaaagtgctgggattacaggtgcgagccattgcacctggctgtcttcaccattttcaggagctgtaggggacccaattctggttcccttcattctttgaagcattttggatgctttcatttgtgttggcttaaaacttttgtgtggaaaagagaatggagtctgctcctcatggtgtgactaatgtaaacagcctctcctggttcccctcttcctacgacacatttcttttgctattttacacatttgtgatttctacggcgtgagtatattctagatttattgtcatgataacacaagaaagagaaaggggaaagtgtcttccaggttgttccccaggcttttttgggagttggaggtgtcaacttaagcaacagagagaagccctctgaaagaaatgacagcccgggcaacatagtgagaccctgtctctacaaaaattttaaaattagctgggtgtggtggtgcatgtctgtagttccagctactcaggaggctgaggtgggagaatggcttgaacctgggaggtttgaggctgcagtgagctatgattgcgccactgcactccagcctgggcaacacagtgagaccctgtctcaaaaaaaaaaaaaaaaggcaaagagaatgatatttatttgagaatgggcattgcaacgggagtatgcatgcatcgtaaatgatgcgggtattcagggaggaaaaggaagataagggtttttaaagaaaaagtgagaagtagataattgttctgaatcaattatccttggctacaagtatcaaaaacaagggtggtgtcagttcaaggttggacaggcagtcgctgggtagatgtaaatatatttttgtgcatgtgtaaggttgtggtggactttgtgcaaggttgtggtttttgcagtcttttgtggtcgtgtgtgtgtgtatgtgtgtgtgtgtgttgagacacagtcttgttatgttgctcaggctggtctccaactcaagcaatcctcctgcctcgctcggcctctcaaagtgtgaagattacaggcatgagccaccgcacctggcccgcaaataattttatcccattccctggcttgtattttcatcctctaaacagtcttttgaagagcaaaagtttttatgtttgatgcaatctaatttatcaattttctttttctttctttcttttttttttttttcttgagacggagtctcactctgttgccaggctggagtgcagtgacgtgatcttggctcactgcaatctctgcctccaggttcaagcagttctactgcctcagcttcctgagtagctgggattacaggcacctgccaccacgcctggctaatttttgtatttttagtagagacagggtttcaccatgttagccaggctggtctcaaactcctgatcttaagtgatccatccacctcagcctcccaaagtgctgggattacaggtgtgagccaccatgcctggcctctgcttttttttctaaaagttttatcgttttctgtttcacatttaaattcatcatacattttgagttattttttgcataaggtgtgaggtttaggttgagttttatttttttggcctatggatgcctaattgttctagcaccatttgttgaagacgtctcctttattgaattgcttttatagctttctcaaaaatcatttggacatttttttttctttctaagttctctgttctggtccattgatctgtgtaactagtgttttgccaataccacacagtcttgattactatggctatataataagttttgaaatcagatagattgattcttctcactttattcttttttttcctttcttttttactttttttttttttttttttttgagacaggattttgctctgtcgcccaggctggagtgtagtggttcaatcatagctcactgcagccttgacttcttgggctcaagtgatcctcctgcctcagcctcccgagtagctgagactacaggcacatgccaccatgcccagataattaaaaagaatttttttttgtagagataggatcttgctacattgcccaggttcgtctcaaactcctggcctcaagcagtcctcctgccttggtctctcaaagtgctgggattacaggagtaagtcaccatgcttggcctccagaattgttttagctattacagttcctttgtcttttcatataaatttcagaataatcttgtctatatctaccaaaagtcttgatgggattttttaaaataggaattgcatttaacctgtatatctatttggggagaattggtatttttagcatgttgagtcttccaatccaagaacatggtatctctctccatttacttagatctctttttatttcttccagctttcttcattgatttctttgatatcttgtagttttgggcatacaaatcttatacttattttgttagattcatacctaattattgcattttctgtgtgattgtcagtggtattttttggtaaaatttgtaaagctgtatttttaatttctttctctctttctctctttctttctttctttcgacggagtctcactctgttgcccaggctggagtgcagtgtagtggcgcgatctcagctcactgcaatctctgcttccagggttcaagcgattctcctgcctcagccccctgagtagctgggattacaggcacgcagcactgcacccagctaatttttgtatttttttttttagagacgggtttcaccatgttggtcaggctggtcttgaactcttgacctcatgatctgcctgcctcagcttcccaaagtgctgggattataggtgtgagtcaccatgtccagccagtatttttaatttctatgtccatatgttctttgctagtttataaaaacacaattgatatttatatattgatctcgtagcctgtaatgcagctgaattcactagttctgaaaggttttttgtagattccctgagatttgctatggaggcaatcatgttgtttgtcaacagagacagtcttattcctttccttttgatctgtatgccttttattttattttatttgagacggagtctcgctctgtcacccaggctggagtgcagtggtgcgatctcagctcactgcaacctcacctcccgggttcaagcaattcttctgcctcagcctcccgagtagctgggattacaggtggcccaccaccatgcccgctaattttttttattttttatttttaatagagatggggtttcgccatgttggccaggatggtcttgaactcctggcctcaagtgatccacctgcctcagcctcccaaagtgctgggatcataggcatgagtcactgcgcccagcctgtatgccttttattttattttcttgcctgtgtactggctagacttgtagcactatgttgaataggagtggtaagtgtggagagaattgtttgttcacaataaaacattctgctactaaagatgatattaaatgtaaggttttctttttgcttttctttctttttttctgaaacaaggtctctttcttttgcccaggctggagtgcactggtgcagtcatagctcactgcagcctgcagcctcgacctcctgggcttaagcaattcttccatctcagcctccccaatagctgggactttgggcgtgtgccaccatgcccagctaagttttgtatttttagtagggatggggtttcaccatgttgcgtaggctggtcttgaacccctgagcttagggagcttcctgctttggcctcccaaagtgttgggattaacagaggtgagccaccatgcccggctgtaaggttttcaaagatgctttttatcaaattaaggaagttttcctcttactatttttctgagagttttttttttaattatgggtgttgaattttgtcaaatgccttctttgcattgattgatatgatcatgtgatttttcttcgttaggctgttaatatgatgactacattgagtaactctcaaatgttgaagcaatgttgcaatcctggaataaactctacctggtgataattttgtgtttgttttagagatgggggtctcgttttgttgcccaggctggggtgcaatggtgtgatcatctctcactgcagccttgacctcctgagctcaagcaatcctcctgcctcagcctcccgagtagctgagactacaggcgtacaccaccatgcttggctaattttataatttttttttttttttttggagacgaagttttgctctcgttgcccaggctgtgagtgcaatcttggctcactgtaacagttgcctcctgggttcaagagattctcctgcctcagcttcccgagtagcggggattacagatgcccgccaccatgcccagctaattttttgtatttttagtagagacagggtttctccatgttggttaggctggtctcaaactcctgacctcaggtgatccacccgcttcagcttcccaaagtgctgggattacaggcatgagccaccatgtccatcctgatttaggttttgaagagatccctggctgctgtgggaagaatggacattgacccggcatgagatgatggtggctcatgctagggggatatctgaggacatgaagaggagtgggtggatccaggaggtattctggaagctgagatgacaggaatgtctggtcccttaatggcagggagcaatcagggactaccctaaattcctggcttgagcagttggctggcagggcatgccatttattgagatggggacactgggaggatgtcaggcatgagaggtgggagccggcagctgtgctttggctgagttgagttgcctgcaagccatccatagggaaagggtatcaagtaggaggctgagtcccaggaagaagccagagcgagaggcagattatatctcagagatcctaagatgccattggtagtaaaaagtgcattctttttttttgtttgtttttttgagatggagtttcactcttgttgcccaggctggagtgcaatggcatgatctcagcttactgcaacctctgccttctgggttcaaccgattctcctacctcagcctccctagtagctgggattagaggtatttgccaccacacctggctaattttgtatttttagtagagacagggtttcgccatattggtcaggctggtctcgaactcctgacctcaggtgacccacccgcctcggcctcccaaagtgctgggattacaggcgtaagccactgtatctggtgaagaagtgcattcttttattatggttaagaatgccactggaccggacgtggtggctcactcctgtaatcccaacacttcgggaggctgagatgggtggatcgcttgaggccagaagtttgagaccagcctgggcaacatagtgaaaccccgtttccactaaaaacagaaaaaattagttgggcatggtggtggccacctgtaatccaagttacttgggaggctgagatgggaggattgcttgagcacataaggtagaagttgtagtgaaccaagatcataccactgcactccagcctgagcaaccagagccagaccctgcatcaaaaaataaataaataaagttgtgggactggaggtgaccatggagatgaataaatggagaagggatactggcctcagaagagtcctgtgcatcccagccttacaggtggggcttaggaggggaggcaggtgtcctcctggtgtcctgggaggtgtttccagagggagggtggaacagagaatgcactgtcccagatgcttctgagacaccccataggatgagggcagaggagtaatcattgggtttggggtcactggagaccctggcaaatgcagtttttgggcagtgatgcttataaaccactgagaatgatcctcagaaaggggagaaaggctggggcaggcggggaaaggacagctgcagggaccaatgctggagaagccgagcagggtggctcggagaaagaggggggccctgtcagagcagcaacaggagggaaggccacagcaggggtgcccacgcagggggatccacagaacactgaaagtgatttccaggctgactcttcccaccaacccaggagtgccttgaaggcaggatgctctgtcctcatctcattattcccaggactttactacatggaccagcacattgaggtgctcaacaatgttcattaaatgaatgcgttcatcttcttgtgagatgaaaggaaaataggtatctgtaatacaaccattttctttgtggattttcccatctggtgattactcccttcccttccctccctccctccctccctccctccctccctccctccctccctccctctttctttctgctttctttctttttctttctttctttcttctttctctgtctctctttctctctcgttctttctctccccttccttccttccttctctctctctctctctcccgccccacctctctctctttttcccttcctccctccctcctgtctctctctttctctttgtctttgtagagacagggtcttgctctgttgcccaggctggagtgcaatggcacaatcatggctcactgcagcctccaactcctggtctccagtggtcctcccatctcagcctcccgagtagctgggactacaggcacacgccaccacgcttggttaatttctttttgttcttattttttgtagagacagggtctcactgtgttgcccaggctggtcttgaactcctgaacgcaagtgatcctcccgcctctatctctcaaagtgctgagattataggtgtgagccactgcgcctggcctgatttttttttttttaataatattagaatgttgtattgtgtgtgagtgagtgtgttggtgaggagagaaggcggcactcaaaactaacgctcactagtgagcatggggacagggtgcgaggcagggtgcccagtcaacagcatgatgtggacaagaatgcaggcacctgcctgctccggttgggtgtactggggacagtgaccttacctggggttttgcagatcatgtgttcatctattcaattgttcattcaatgttgtctgagcagtgaagggccaggaactagtgtgtagagagaacacgatcctctcctcgtgtgtacagggttgatgcggggaggacatgttcaaagattcacagcattggagggagacctggtccgtgggtttcccttgggagtgacatttagcagagacctgggggactaggagatttcactaggggaagagatgctggtgaggaggaaagagctctgttcagggttgggcgtggtggctcacgcctgtaatcctagcactttgggaggctgaggcaggcagatcacctgagatcaggagttcgagaccagcctggccaacatagtgaaaccctgtctctactagaaatacaaaaattagccaggtgtgatggcggttgctcctagctactcaggaggctgagacagaagacgtgctcaaacccgggaggcagaggttgcagtgagctgagattgtgccactgcactccagcctgggccacagcgagactccatctcaataaaaaaagaagacagctgttcaggccatgtagtcgcccctggaggaagcccctggctggaggcagacaccctgggccaaccccctccctgctggctgggaggctggactggactgggtgactttattgccagggtcggggactcaaaggcagacagacaaaccatgcttccctcctccgtgcctcagtttcccatcctgggaaatagaacccccccaccttcctctggagtggatcacagccccggctgggctctgttcattgcagtggggacgttgggcgtcacggacattgggtgtcactgacaccaccctagtcccctcctaaacccctcggttggctgctggctgggacgggctggggctctggggcctgatagacttagaaggacaagtcccagggactcggggggttaagttttcttcggccgggcttcccctgcccttggctgtctcccaggcccctcggagtcctttgatggcattagagccaaccttttccagatgtgctgagcagagggatttgccggaactctccggggcttcatctgcctccttcattcccctctgccagacggccccctgcccgccagcctcccccctctggttgggtcgcctgctgttcaggatggatgcccgcaaggcaacacaaagtcctggattgaagtgctttcttaaaacatgctctttcttccctgcctctcctccttagcgggactgtttgggttgagaagctcaccatggctgcccaccccaagcagtgggggcctgtctgggctgcatccactgcaccaccccgcaccgcccccaggtggactgtgaccctgggccagagggtgaggtgaggtttggcagaagaccctgcccactgggcccactgtccattccgtctggctctcgggaacgtctagcttggattctggggaggctggaggcctcagaaatgcagtgggaagcccctttcccctccccgctggcctgcagctattaatcaagagattaataatcccctgcctcccgctctgaaacctccactctcgtttcctgttgagtctccagcctgactcggaacctcccagtctgtttctcccctcgtgggggttcctagtgaggaagtggaggccaggggaggagtcgggggcgggcaggcatggaggctgagaaggggtacgtgcccagtgagggaggggcatctggctcccccaggcaaggttctgggctggcagagtcattctgagcaggcgatccctggatggtgcaatgtccccccgcacccgaggcaggacttcgtgacgctttgggccacatccactttggagaccagagagccaagacctctgcttactcacctccagtgatggggacctcatttctccggggagccctccccaccagcatttcattttttttttttttgagacagagtctcactctgtcccccaggctggagtgcagtggcacaatctctgctcactgcaacctccacctcctgatttcaagcaattctcctgcctcagccccctgagtagctgggattccaggtgtgcacaaccatgcctggctaatttttgtattttcagttgtgacggtttcaccatgttggccaggctggtctcgaattcctgacctcaggtgatccgcccgccttgacctcccaaagtgctgggattacaggcttgagccactcccagactgagactgcatccaggcaccctgttcgttgaatgcttcgttctttccaccagtcttcactgggtgcagacgatgtgcctcgctctaagctaggcaggcggtgtagccagtggctccgtggagaaggatgtcagacaaataattacatacatgggtgtacaatcataagtgcttagaagagaagtctgggtactttgagggtgtagattgaagaggcccagcttgctgtagggtggaagggaccgagtgtgggctagtcagggtgggcttctaagaggaggcagcactttcactgagctctgggaggctgcatgacttgggcagagacagagcacatgcacacagggccagtggagtcctgaatgggggcggagttccgaatggggggcggagttccgaatgggggcggagttctgaatgctggtggaattctgaatcgggcggagttctgaatgggggcggggaggagctggtggccaaggagaggaggagggatggccaaggtatacagtagccagatggcagaagtccacaaggttaggcttaggatttgggtattgtcctaagattttttttcttttaagagacagggcctcactctgttgcccaggctggagtgcagtggtacattcacagctcgctgcaagctcaaactcctggactcaagtgatcctcctgccttagcctcccaaatagctgaaactacaggcacgtgccactacaccccactaattttttttttttttttaagagacggggtctggctatgtttctcaggttggtctaaaactcctggactcaagcaatcttcccacctcagcctcccaagtacgtggggactacaggcatgcaccactatgcctggctaatttttaaatttttggtagaaatgggggtcttgctatgttgctcaggttggtcttgaactcctggcttcaggtgatcctcctgccttggcctcccgaagtgttgggattacaggcatgagccactgtgcctggccttgtcctgagattgaagaaaagctaggagaggttcaaggacatttctgctttaaaaacgtcacttggagctgggcgaggtggctcatgcctgtaatcctaacagtctgggaagccgaggcgggcggatcacctgaggtcgggagttggagaccaggctaaccaacatggagaaaccgcatatctactaaaaatacaaaattagccaggcgtggtggtgcatgcctgtaatcctagctactcgggagactgaggcaggagaatcacttaaacctggaaggtggaggctgcagtgagccgagattgtgccattgcactccagcctgggcaacagagcgagactccgtctcaaaaaaaaataaacaacagtaaaaacaaacaacaaaaaagcatcacttgggagaaccagagagggagggaggcagatggggtatatgtggaaagatggggtatatgcagtcaagggtggggtgaaggttcagggctggctcctccactttctgttggtgtggaccaagtccagctctgcacctacctgccgcacagtctctggtggactcagtgttttcatccataaaatgggacagtaatactctcaggtgtgagtgggccgagtacgcaggcattcagtggctacagcccccttaagttcccctttcttttctttttgtattttttttagacagtctcaatcttgcggtccaggctggagtgcagtggtgtgatctcagctcactgtaacttccgcctctcgggttcaagcaattctcctgcctcagcctcccaagtagctgggatcacaggcgtgcacaaccacgcctggctaatttttgtatttttagtagagatttttagtagagatggggtttcaccatgtttgtcaggctggtctcgaactccaagacgatccacccgtctgggcctcccaaattgctgggattacaggcgtgagccacagcgcccagccccctttctttcctgagctgattttgccatccttaaaatgggcatgtagaacattttccagggaccagtgaggggctcgcccaccttcagctcattcctggagtctggtggttttggcagacagactctaggaggaccaccccaccttggggtttgtttggacccacaccaggctgaatgtaatacccaggaaaagcctcagctctgcatcctgaaggggtgccaacagacccaggagagccagatccctagtcagtcgattgatagtgatatgtacctcctgggtgctgggcagatgtggtgggagaccttagaaaggcttcctggaggaggtgacctagagagagacagaaagagagagagacaagaaagaccagcccctcagagggcaatagggtgaaaccccgtctctactaaaaatacaaaaattagccaggagtggtggtgcgcacctgtaatcccagctactcgagaggctcaggcaggagaatcacttgaacccaggaggcggaggttgcagtgagccgagattgtgccactgcactccagcctgggcgacagggtgagactccgtctgaaaaaaaaaaaaaagaggtaaggaaactggtgtgctggagatttgtgagaagaccagtgtggctggaaaacaaagtcacctgcgaggccagggaggacaccagatcaaagcaggcagagcccgtgggccatagagtggacttggtgaccactggaagtcatggatggatggggctgctccaccttggggagaatccaggcatcagaggccaatcttgtttttgcctccaaaatctaagagttgttaaagtcttaggggtaggagggacaacaccccgctccagagctgtgtggcacctggccgggaccttgttattggcccttaatgttcccaccaagcagcaaagttgacactaccatgtggctggggactctgcagggagccttgaggaagatgagttccctcttggagcctggtgtcctcaactgagtgcggccttaaggctgacagaggttaaataaaatatgtacaccctgtttttgagggagggcagtccctaaactggatctgcattttagaaagtttgcctaggccaggggcagtggctcacgcctgtaatcccagcactttgggaggtcaaagtgggcagatcacctgaggtcaggagttcaagaccaacctggccaacatggtgaaaccccatttctactgaaaatacaaaaattagccaggtgtggtggtgtgcgcctgtaatcccagctactcaggaggctgaggcaggagaatcgcttgaacccgggaggtgaaggctgcagggagctgagatcgcgtcactacactccagccggggcaacagagcgagactctgtctcaaaacaaaaaaacaacaaaaaaagaaagtttgcccaactggaccctagcggcaggggctggcaattcttcatggggacaggaggccagcctccctcgggtttttttccaagactggggaaatgggccacaaatgtggaacctgtcttgggcattcaggtgagactcaggggggctaccaagctgagtcttggccggttgggatggtgacacagtgccacctactggtgtgccccacgcctggacttggcagccatcaggttccagagtggcatgggccaagcccatggaattcagaatgaggggccaagaaagactgtggccaggagcggtggctcatgcctgtaatcccagcactttgggaggccaagacaggcagatcacctgaggtcaggagttcgaggccagcctggccgacatggtgaaaccctgtctctacaaaaaataccaaaattagctaaaattaggttaaaaatacaaaattactcctgtaattgcagctacttgggaggctgaggcaggagaattgcttgaacccgggacacagaagttgcagtgagccacgattgcgccactgcactccagcctggcgacagagagagactccgtctcaaaaaaaaaaaaaaagaaagaaagaaaaagaaaaaagaaaagagcatctccagagggatgagctcagtttctgaatcaggggcccgagatcagtccctgtgtgtagatgagagggaaaacctttgcctgtactgaacgaacacaaattagtattactgggctctggaaccaattctgcctgggttcagatcccagttccaccaccttgacaaagttgcttaacctctttgtgcctcagtttccttgtctgtaaactgggaataatggcctctgttgttctcagtcagcttatgtaaaccactcagtacactgtgagtctgcaattgaagctactattatatttatatattttttaagacagagtctccctctgtcacccagactggagtgcagtggtgcaatctcagctcacttctatctgtgtctcccaggtttaagcgattcttgtgcctcagcctcctgagtagctgggattacaggcgcccaccaccatgcccggctattttttgtgtgtgtgtttttagtagagatggggtttcaccatgttggccaggctggtctcgaactcctggcctcaaatgatccacctgcctcagcctcccaaagtgttgggattacaggcgtgagccaccgtgcccggcctatcatacctacttttattgttctcatgaccatcttcatcattccaagtgtggattgaagtgagagtgtctggtgcatctggagggctcccgcctggtgggtgagggccagaggtgtctgtgtgaggtggaggagggccagcacatttggctcagcagcccggactctctcctgatgacagtggggacggccgaagggtgtgggttgggaggaatgaggtcaggtctgtattttgcaaacccagcatccatgcacccctcctgcactcacagccttacaccaggcatcctggtctccctggtatcctcatcatacagaccaggaaacaggctcagagaggtttaggtacctgtgcaatgttgtatagtgaattagggacagagcccaaatgccaggcttgcactcctgagcccagggctccattgatcccatcgtgcagaggttaagggagggacctgattttttggcatcagctgtgctcagcagggtgcaaacaacagcagcttggcccttgcgcctgccccgggccctgggtggactctgtagtttttctggtctctcgtagtcggaagaccatttcaggaattaattttaaaactgccatttttaatctaaacaaaagctctcctctgtccaagctgggcctgctttcggctggcagatctgcggcagcaagagggttgtgagccctttctgtttttctaggtctttctttttttttttttttgagacagagtcttgctctgtcacccagattggagtgcagtggcacgatctcggctcactgcaacctccgcctcccgggttcaaggaattcccctgctgcagcagactctgtctaaaaacagaacaaaagatatggcatagaaacatatttggggttgaaatattttgatttccttccttatctgccatgcgatgttatgctagagcctggttggaaagccagccacatcatatagggttaaaatagaacctgtgtgatgaggctttgtggtttgaaaggcgtgactccccaggctccttagataggaatctgggcaagagaagaaaacggtcagaggttagtcctcaggtatgtgagcgtgtttagtgtgttagtgtgaggctgagtgtgtgtttatccaagcgtgtgaataggtgcatgtgtgtgtacataattgcgtacaagtgtgtgactgtgagtgtgcatgagtgagtctgagggtgctgagcacgtgtttgtgtgagtgcgtgtgtggaagtgtgcacgagtgtgtttgtgcgagtgtgcaagcacgagtgtgcacacgagtgtgagagagcaaatgagtgtgtgactgtgtgagggtgtgcgtatgtgttagtttgtgagagcttgcaagtaagtttgtgcaagcgtgtgaaggtgtgagagtgtgtgagggcacgtgtgtcctcacatgggtatgtgaatgtgtgtgcatgtatgtgagtgtgtgtttattgtgaaaatcgtgtatttgtactcatcatcgcataccagagtcacttgctgtaaggaggggtgaccttggaactaaggctctgccacctctttccaaccccccatcctgcactggattgcccagttgctcccaaaagctgggggctttgctctccagctcacagctgtgggcacctctcctggtcatctcctacctcctgtcccagctgcacacaaccacgctacccccagatctccagggggaaactggtttgctggaatgtttatgaaacacgagtgcaggtttttgcttttttaaaaaagaaatgagcgtaacaggatttttcagattcagagctgtacttctgaaatccagttctccactcgtgtgttttcctgtcaacagtgcgtctccaaacgtcgcgcctgctgctaccaattaattcatgattgtttcattcaccgattaagttgctcgatgtcagcagatttaaattttgtgaagttatgtagttttgtcttcagggggacattgtgcaaacttgatcaagcagcagttatgacaatgcacgtaaagtgaataataaaagctgaatgtgtctcccttatgaaatttggtcatgcattttatattcgcgattcttggagtgtgacaaaaaagcatccaacttatgtgtaagaaaaatttcgaaactgtgggagtgtgaaactttacgatgggattcacagcattttgcaagaatttttttttttaattcctgcaagagtcccactactgtattccaagttttttcttttcctttttcttttcttttttttttttttttcagagacagggtcttgctctgttgcccaggctaagtgcagtggttcgatcatgctcactgtagcctcaaaactcctgggctccagtgaccctcccacctcagcctcccaagtagctgggactacaggtgtgcacaactatgccgggctaatttttttatttttattttttgtagagacagcatcttggtatattgcccaggctggtctcgaacttctgacttcaagcaatcctcctgcctcggcctcccaaagtgctaggactacaggtgtaacccctactcctggccgtgtatgccaagttttcttcattgaagtgtctcgctcttctcaggatgatgacacagttttataaatctatgaccgcaatatagcacaaagtgggtgttcaataaacccactttgggtttattgttggtgaatcaaccaaaagaaattataattgggaaaaaggtcagagtagatgatagttgaaaattttgcaggtcctgctaatttctttcttccttcctttccttccttcctttcttctttttttttttttttgagacagagtttcactcttgttgcccagtctggagtgcagtggcgtgatctccactcaccgcaactccgcctcctgggttcaaatgattctcctgcgtcaacctcccgagtagctgggattgcaggcatgcgccaccacacccagctaatttttgtatttttagtagagatggggtttctccatgttgggcaggctggtcttgaactcccgacctcaggtgatccgcccacctcggcctcccaaagtgctggaattacacgcgtgagccaccgtgcctggccccttttctttctttatcatcttggtcagtgttcagtgttcaggacactttcccctcacaggtggccacacttggagagttgtacaatggcagagctagaggggactttattttttattttattttattttgtttgtttattttttttgagatggagtctcactctttcacacaggctggagtgcagtggcatgatctcggctcactgcaacctccacctcccaggttcaagctattctgcctcagcctcctgagtagctgggactacaggtgcctgccatcatgcctggctaatttttgtatttttagtagagacagggtttcaccatgttggccaggctggtctcgaactcctgacctcagatgattcacccacctcggcctcccaaagtgctgggattacaggcgtgagccaccatgcctggccaggtactttatgtttactattattttttgtttgtttaaatttatgggttacaagtgcaaccgatatattgcacagtggtgaagtcagggctcttaggaaatccatcacccacataatgtactgtattagactgttcttgtgttgctataaagaaataccggagactgggtaatttataaagaaaagtttaatttggctcacagttctgcaggtttacaagcatggtgccggcatctccttggcttctggggaggtctctggaaactttcattcacggctgaaggcaaattgggattaagagagtgagggggccgggcgcggtggctcacgcctgtaatcccagcactttgggaggccgaggcgggcggatcacgaggtcaggagatcgagaccatcccggctaaaacggtgaaaccccgtctctgctaaaaatacaaaaaaattggccgggcgtggtggcgggcgcctgtagtcccagctgcttgggaggctgaggcaggagaatggcgtgaacccgggaggcggagcttgcagtgagccgagatcccgccactgcactccagcctgggcgacagagcgagactccgtctcaaaaaaaaaaaaaaaaaaaaaaagagagtgagggggcaccaggcgcggtggcccatgtctgtaatcgcagcgctttgggaggccgaggtgggcggatcacgaggtcaggagatcaagagcatcctggccaacaaggtgaaaccctgtctctactaaaagtacaaaaattagctgagagtggtggcatgtgcctgtaatcccagctacttgggaggctgaggcaggagaatcgcttgaatctgggaggcggaggttgcagtgagccgagatcgcgccactgaattccagcctgatgacagagcaagactccgtctcaaaaaaaaaaaaaaaaaaaaaaaagacagtgatgggggaggcgccacaccattttaaataaccagatgtcacgtgaactgagagccagaacccacttatcaccaaggggatggtgctagaccattcatgagaggtctgtcccctgatctaatcacctcctaccaggcttcacctaatgctgggaattacatttcaacctgagatctggagtttggacaaatatccaaaccctatcacatacattgcattcattacctacccatccctttccatgtctccattgtgtacacattgtttacctccctcttagagaacatatggtatttgtctttctgtgcctgggtggttcatgtaagataacagcctccagttccatccacgtttagatcacagctgatacagagagggatggcgacttgtgcagggtcacacagctgtcactgcccaaggggttcaccttgcctgctgcttagacacagctgatttatcaagacaggggaattgcaatagagaaagatggccgggtgccatggcttgctcctgtaatcgcagcactttggaaggctgaggtgggtggatcacttgaggccaggagttcgagagcagcctcacaaacatggtgaaaccctgtctctaccaaaaatacaaaaattagctgggcctggtggcacacacctataatctcagctactccggaggctgaggcaggagaatcgcttgaacctgggaggcagaggttgcagtgagcccagatcgcgccactgcactacagcctgggcaacagagtgagactctgtctcaactaaaaaaaaaaaaaagagagagagagagaaagagtaatttacacagagccggctgtatgggagactggaggtttttatcactcaaatcagtctcctgagcattcaggatggagtttttaaagacaatttggtgggtagaggctcggaagttggggagtggtgactggtcaggttggagatggaatcgtagggggtcgaagtgaggttttcttgctgtcttctgtttctggatgggatcatagcactgctcaagccagattacaggtctgggtggtatcagctgatccatcgaggacagggtctgcgaaatatctcaagcactgatcttaggttttataatggcgatgttatctccaggagcaatttggggaggttcagactcttgcagccataggctgcatgaccccgtaaaccataatttctaatcctgtagctaatttattagtcctacaaaggcagactggtacccaggtaagaagggggtctttttgggaaagagatattatcaattttgtttcagagtcaaaccataaactaaatttcttcccaagattagttcggcctactcccaggaatgaaggaggacagcctaaagttagaagcaagatggagtcagttaggtctgatctctttcgttgtcataacttcctccgttatgatttttgcaaaggcatttgcacagccagtgaacacggaccccggcagtggtttccacgccatgggggcctcccggagccctggctgggcaaaacagcctggcccatctttgcagcagtggggtctggaggtgggtgggtgggagctcatgcccccctgacgctgtctgtgtgttagttacaggactctgatcagacccacctacagagtgtcctaccgcacggtgacggtgctggagtggagatgctgccctggcttcaccgggagcaactgtgatgagggtaagttggcaggcacttgggctgcagggggccaggcgtgggccaggctggagtttctcccttctctggcctcctcctgcaagcagctttcctttcctccgtagcttgaaatcctttccttttcccaatcgcctctgaagcaaatgttctgtatcggcctggccaaaccaggatgaagctgcccgccctgcccgtgggcaccgaggcaggtcctagtttgcactggttgggtagtggaatacagaagccaaaaacagcactggtgccaggggaagggatttgatttctagccggtttcttccacttttggctccgatgcacccagaacccctggggcaggcagagttggatatctgggctctgagcaaatgcggatgaggtcccaccagccttgaggccacgtattttgtagactgagacagagaagctgaccggtagctgcagatagacgttcacccagctgctttctgcctttctgccctgttggtgtttagcccgggggcctgggctcagcctggctctggagcctgagagggtcacataacagcacttaggtgggccagcagtggcagacagagcaaatcccccttcactgctggccagggaaattgagtcctgcctaatgaacaagtttgcagcccaccttgttccccagcatggctggatgggtctggaggctgaggctcagcggtcagatttttcttctttttcttttttttttttgagacaaggtctcactctgttgcccaggctagagtggagtgacatgatcatggctcactgcagcctcgaactcctgggctcaattgatcctcccacttcaccctcctgtgcagttgggactgtaggtgtgcaccaccatacctagctatttttttgtatgatttttagagacgggtcttgcattgttgctcaggctgtctcgaactccttggatcaagcgatcctcccaccttagcctcccaaagtgctgggattacaggtgtgaaccacctctcccggctggaggggtcagttttgtatttggaaacagtagctgtctcccaccttcgctttctgacaaaattcttctcttctctgtcatcttgttacttactgatttgatagcaggatctatatgctttgagtgtaaactgtctaaagagctctttgggttacaaagaataacgcaattgacagaaatagagactctgacaattgcttcagggggcctctggcccacagcagagctgaaggaaaaaggctgggatgccagggagtccgacaggtgcctctggtcctggttgatgaggtgcctgatgctggcaggggaggctgggctatccttgttggaggttccagggctgacttggacccttctttggagaggagcaggaaggacctccaaggtgaaggggtgaggggatgccaggtttctgagcagtgggctggccctggcataatgctatggtgttgaacgaccacagctcacaggtccctcatggaggcctgagcccttcaatgccaggacttggacctgccattctggtcagcgccacggctgtggacacagccatctggtccccccaacgggatggagcaggcctgccatctagatcctgccaggggccgaggaggcgagagttgctagggaagtgattagtttacccttaagtaagtacctgagcctgtttcagtgatcaataaaatcagcaatgttagccgggaatggtggcttatgactgtaatcccagcatttcaggaggctgaagccggaggatcgcttgagcccaggagtttgagaccagcctgggcaacatggtgaaaccctgtctctactaaaatatacaaaaattagccaggtgaggtggcatgtgcctgtagtcccaggtactcaggaggctgaggtaggaggatcactgatgtatgtgtgtatacacacacacatgtatttgtagattgggggtccccaagaccacccttaggtttgacaccttgctagaagaactcagagaatgtattaaaaactattatgctcatggtcatggtttattacagcaaaaagatacagattaggatgggcgtggtggctcatgcctgtaatcccagcactttgggaggctgaggagggaggatcacttgaggtcaggagttcgagaccagcctgaccaacatgatcaaaccccaactctactaaaaacccaaaaattagccgggcatagtggtgggcgcctgtaatcccagctacttgggaggctgaggcagaagaatcgcttgaacccaggaggcacagattgcaatgagcctagattgtgcctctgtactccagcctggatgacagagtgagactcagtctcaaaaaaaaaaaaaaaagatacagattaaaatgagctagggaagagacacatggggcaggccgggcacaggagagtttcatgtatggaacctctagttgtcgcctcccagtggagttgtggacagctgtactttcccagcaatgacatgtgtcagtatatacaaaatattgccacccggggaagctcatctgagccagagattttactgtggcttaggtacatggaccatggccagcctgcatggctgactcagattctagcccctctggaagatgagctggtaccaggtggtgcaaggatgtcctcatcaacgacattgttagcacaaactatccaatgtggcctgcgttagcatagactgtgtggcatggtcgaaggtccccaggtaggcagatactgtgaccaacctggacattccaagggcttccaaatacctcccacgagccaagtgcaaaggccagacctcctttagggtaagattaattctttgtgtgtgtatatatataatatgtgtattacatattattattgaaatatataatatatagtaattgtgatatattaataatatatattctatattcaataatatagaattattgaattatttatattccatattctatatgaatatgaattccatagtctatatgaatatgaattccatagtctatatgaatatgaattccatagtctatatgaatatgaattccatagtctatatgaatatggaatgtagaatgatatacaattctatatggatattgaatgcgttattaataatttatatattccagtaatatatattatcaataattatagatattaattattgataataaatattatcaaataaatattcatatattgaataatatataatattgaataattgttgatatatattattgaataattattaataataattaatatatattccagtaacatataatatatattattgaaatatatgatacgtattatatattgttgaaatatataatatataattgaaatatataatatagtcattgagatatatatgtaatatatatctcaataattaatataatctcaataatatatataaaatatgttactgtagacaatttatacattgtatataatatatacaatatgaaagatatatttatatatgatgtaaattatgtattataatgtgaattatgtattataatttatattatatttctatttaaacaatgtatgtattatataaattatatataatgttatatttaaattataatttatattatatataaattatatacaatttaagtatccctagtccaaaatccaaaatgttctaaaatctgaaactttctgagccctgacatgatgctcaaaggaaatgccaagtagaacattttggatttctgattttctgatttgggatgctgaactggtaacataattatatattatacgtaaagtatataatttatatatgtatataaaaacgaacctgaaattaagaccactaaggttgagcctatggggtagtaaagacaaaagctttgtggttattgtctctactgaaaagaaatcatttgcatctttttttttttttttttgacggagtctcgctctgttgcccaggctggagtgcagtggcacagtctccactcactgcaacatcagcctcctgggttcaagcgattgtcccacctcagccttctgagtagcagggattacgggcatccaccaccacacccagctatgttttttgtatttttagtagagatggggtttcaccattttggccaggctggtctcgaactcccggcctcaggtgatctgcacccatcggcgtcccaaagtgctggaattgcaggcgtgagccaccgcgcacagccaaaatcatttgctttttaccagttttgtatgagttaacatccaacttggcagaatctgagctgcaatgcatagtgagcggtaactcaaagtgacattctcctggggtgtcatacggcacgtgggcaggctcatgagatagtgctgtagcctgactctagaaggttagtccctcagctttttgccctatttccacattttgcagagctcttcttgcagactgagtggatgaaacacagtagcccatggcagcaggtggcaggaccgtgggaggacagtccctgctgactgggaggtcctcaccaccaagtaggttcatgtggggctgtggacccacctttctcaatagaggaggcagaagtgaaggggggtgactgtgagctggtgaattgttccaaaggtgtccaccctcaagggcttggcacttcccttcaagaagaaatttcttatccgataaaccacattgatatgatcaatatacagtcatgcgtggcttaatgatgtggctatgttctgagaaatgcatcattggaagatttgtctttatgggaacaccaaaggatgtacttacagaaacctagatgatctagcctattacacacctaggctagatggtctagcctattgctctgggctacaaacctgtatagcatgtgactatgctgaattctggaggcattaggaatataatggtaagtatttgtgtatatcaacatatctacacatagaaaaggtacagtacaaatatattattattattatttattaatttttttttttgagatggagtctgtctgtcagccaggctgaagtgcagtggtgtgatctctgctcactgcaacctccgcctcctgggttcaacggattctcctgtcttagcctcccaagtacctggggttacaggcatctgccaccatgcctggctaattattgtatttttagtagagacggagtctcaccatgttggccaagctgacctcaagtgatctgcccgcccccgcctcccaaagtgttgggattacaggcgtgagccactgtgcccggtctaaaatacagaattataattttaatgggggtgggggagcagacgtggtggctcacgtttgtaatcccagcactttgggagcccaaggcagtggatcacttgaggtcaggagttcgagaccagcttggccaacatggcaaaaccccgtctctactaaaaatagaaaaactagccgggcgtggtggcacgtgcccgtagccccagctactcaggaggctgaggcaggagaatcacttgaacctgggaggaagaggttgcagtgagctaagatagtgccactgcactccagcctggttgacagagcgagaccctgtctcaaaaaggaaaagaaattttatgagaccactcgtatatgcagtctgtcgttgactgaaatgtcgttatgtggcatgtgactgtactcaccagaaacatctggagttcttggactgattatgatgagttccagcacctctcaagatgctctcagcctcagacctctgccagcccctccctggtggagaagccttctgggcttcaagcaccttgctcaggatgcgtgtccccttctgaaagttttagggttaagtgactcttctagctgtgtgcctgagggtcctggacatctcaggagtggggagttggcagctgaagaattcctgggagtctgagcctgggctgagtttgggatcggctcctgaaaacccttgtaaagattttacattcccgaatataaaccaataaagacagcaggctaaatcaaggccatgcccatgtcttgggcacattccgaagatggttgtggtgagtcccgcaccattaattcccttttgcgtctcattcctgcctctctggaaacaagcaggtccatgagatgcagttcagtgggttttgctgtggttcagtggggtttccctccctagacaccccaggagtgcaggtctaaggtttggaaatactttcctttctacatatgtctatacatgatccatcttaatgaattgcacatttcgtgtttgtgaattcacctccttgataaaattgatgggtaacccctaaatcaataacttgcagcggtcattcatggatatggggcacagtagcaaaaactttgagtcaccagacatgcatgtttcctactgaggtcaaaccaggtgacaccctggctccctgtttccctctcaaactgcaaagaagtgtcctgttcttttctttttttcctttccttttcttttctttcttttttttttttttgttatggagtctcgctctactgctcagactggagtgcaatggcatgatctcggctcactgcaacctcccaggttcaagtgattctcctgcctcagccttccaagtagctgggattacaggtgcccgccaccacacccagctaatttttgtatttttagtagagacagggtttcactatgttggtcaggttggtctcgaactcctgacctcagatgatccacccacctcggcctcccaaagtgctgggattacaggggtgagccaccgcacccggccaagtgtccttttcaaggtctgtttagtaccatagtttttgcatctttctgcctttttgggggtggtttgttgtttagaatgtcccccaggcatagcgctgaagtgctctctggtatccctaagcgcaaagaagctgtgatgttccttgcggagaaaatatgtgtgttagataagcctcgttcaggcatgagttacagtgctgttggctgtgagttcaatgttaatgaatctacagtaaatatgttaaaaggtgcctttaaacagaaacacaggtaagacaaggttatgtattaatgggttgatgatcctgaaatcagaggctcaaaggacctaaccctgtatttcccgtataagcaatggttcagtattcactaaggtagtgtaaatggtgatttcatagagcataaattctgtgagccagcatcaattgtatatatggatctatgtctaactaaatatctaaaacaaaattttttctttatctttttttttttttttttttgagatagagttctgctctgtcacccaggctggagtgcagtggtgccatctccactcactgcaacctccgcctcccaggcccaagtgatcctcccacctcagcctcccaagtagctgggactacgggcatgaaccaccacacctggctaatttttgtgtatctttgtagagacggggtttcaccatgttgcccaggctggtctccaactcctgggctcaagcaatccacctgcctagacctcccaaagtgctgggattacaggcatgagccaccatgggcagcctagttttttcttattacaaaagtaactacatgtttagtgcagaaaacatagaaacacgtagtattacacctctcacttgggtgagaagcctccagatctttttctgtgcttgcatgttaattgcactgtacatgctgtttggtaagtttcttttcttttctttttttttttttttttgagactgagtttcaccttgtagcccaggctggagtgcaatggtgcaatctcagctcactgcaacctccgcctcccaggctcaagcgattctcttgcctcagcctcccaggtagctgggattacaggtgtgcaccaccacccccagctaatttattatttttattatttttaattttttttgagatggagcctagctctgtcacccaagctgtagtgcagtggcgtgatctcagctcactgcaacctccgcctcctgggttcaaaccattctcctgcctcagcctcccaagtagctgggactgcaggtgcacgccaccaggcctggctaatatgttttgtatttttagtagagacgaggttttaccatgttggccaggctggtctcgaactcctgacctcaggtgatccgcctgcctcggcctcccaaaattctgggattacaggcgcgagccactgcacctggcctggtaagtttccttctcacataaattatcatgaacatctgtctttggcaatagatagccttctataatatcattgtgagtggttgtagaacttgagtatacacacactttattaaataatgtaagatatttaaattgtttctaatttttaaataacattactgtaagtatatatatatatatattttttttttaatggagataaaatttacacatacttaaatgcacagattttctctttttttgagatagggtttcattctgttgcccaggctggggtgcagtggtgtgatcatggctcactgcaaccttgacctcccaggctcaagcaatcctcctacctcagcctcccaaggagctgggactacaggtgtgcaacatgctgagctaattaaaaaaaaaaattctgtctgggcgcggtgtctcacgcctgtaatcccagcactttgggaggtggatcacctgaggtcgggagttcgagaccagcctgaccaacatggagaaacctcgtctctactaaaaatacaaaattagccggtcgtggtggcacatgcctctaatcccagctactcgggaggctgaggcaggggaatcgcttgaacttgggaggcagaggttatggtgagccgagatcacgccattgcactccacctcggcaacaagagcaaaactccatctcaaaaaattatatatatattttgtaaagacttgtttacaaaacaagtcttattatgttgaccaggctggtctcaaactcctggtttcaatctatcctcctgcctcggcctcccgaagtgctgggattttaggtgtaagccactgtgccaggcccacagatgttaaatgtacaatttgatgagttttgataaatgcatactcatttccatcagctcccagaaagtctctaccccagtgtaattgctcagtgggttcttcctgcctgccgcccagacaaaaccagttcgctgagaccgtggtattacagtaaagaagtattttaattaacatgatgccggccacgtgggagaactggagttatcactcaaatcagtttccttgaaggcttgaaggttagggtttttcaaggatagtttaatgggcaggggactagggaatgggtgctgcttactgtttggggatgccatcataggggtgtggaaaacggtccttgggcactgagtccaacactgggtgcaaggctacaggactggttgagtgatgagtcatgagtccgggtggggtcagtcagttgccagcatgcaaaagtctgaaaaatatctcaaaagaccaatcttaggttctaccatagttatctataggagcaactggggaagtcatcaatgttatgacctctggccgcatgtctcctgtgtcataaaggattatagaaaccatgtctacattttagcagaattcaggcacctataattctaatctcatgtcctttcattgtctttcaaaggcagtttcctcccctaaacaaggaaggaatccgttttagggagagagtgttatcatccttgcttcaaagttaaactataagctaaattccttccatgttcagcttggcctctacccaggagtgagcaaagacccccagcgtgtgaggttagaagcaagatggagtcagctatttcagatttcactcactgtcataatctttgcaaaggcagtttcactagaaagcactgttctgacttctatcatcatagatcaattttgactattcttgaactttatataaatggaaccatacagcatataatcttttgtgtatggtttgtttcacttgcatttttgagattcttccatgttttacatatacatgtgtagtttacttgtatttgttgctggatattattccattgcatgaataaccatcattttgctaggttgtggtatagcttaacttttttttttttttttttttgaaatggagtctcaccctgttgcccaagcaggagagcaatggcacgatctcggctcattgcaacctccgcctcctgggttcaagcgattctcctgcctcagcctcccaagtagctgggactacaggcacccaccagcacacctggcaaattttgtatttttagtagagatgggctttcaccatgttggccaggctggtcttaaactcctgagctcaagcaatctgcctggctcggccttctgaagtgctgggattacagggttagccatggcacttggcctcattagatttatactttaaggataattccttaagtcacatttcaccagtagatgtcctaccagttagttcaatctggctagcagcatagtggacttcatcacctttaccaatatcatgtcaatgtgtctgtattcctcacctgtgaaatggtactttaggccgggcacagtggctcacgcctgtaattccagcactttgagaggttgaggcaggaggatcacctgaggtcaggagtttgagaccagcctggccaacatggtgaaacctcgtctctactaaaaatccaaaaaaactagccgggcgtggtggtgcatgcctgtaatcccagctacttgggaggctgaggcaggagaatcactggaaggtggaggttagagtgatctaagtgagccaagtgagccaagatcacaccacggcactccagcctgggcaatgtgagtgaaaactctgtctccaaaaaaaaaagaaatggtactctatagtttagaaagtgttttcagtttgttgtgtttccattttgtagatgcagaaacaggcgcagaggaaataagagatttgtccaagtcatctagctaaggagtggccagtgtagaactgaaacctgggtcttttttttttttttggagacatggtctgactttgttgctcggcctggagtgcagtggcatgatcatagctcactgcagccttgaactcctgggctcgagcaatcctcccacctcagcctcttgagtagctgggactacagatgcgtgccaccatgcctggctaattttttaatttatttcatttttgttttgtaaagtgaggtttcactatgttgcctagattggtcttgaactcttggcctcaagcgatcctcccaccttggccttccgaagtgctgggattacaggcatgaatcactgtgcctggctgaacagggatctttttgttcctaattaggtgccctttactctaagctacctgggacctttgcagtcttgggaaatcccacccgaagttgtcccagtacaagggacagggccgctagtctctgggctggctccttcctgcaattcctaaggtggccttgtccctagagttcttttgtttgtttgtttgtttgttgtttgttttttgagacggagtctcgctctgtcaccaggctggagtgcagtggcacgatctcgtgctcactacaacctctgcctcctgggctgaagcgattctcctgcctcagcctcctgagtagctggaattacaggtgcccaccaccacacccggctaatttttttttttttttgtatttttagtagagatgggatttcatcgtgttagccaggatggtctcgatctcctgacctcatgatcctcccaccttggcctcccaaagcattgggattacaggcataagccaccacacctggcctacacctggcctacgaccgtggagttttaaggccccatctcacattggcttggtgttgtagaagagatttaccacaaagttgatcatctcctcaaccatcaggagatgataactttattctgagtaggggatttttactctttttttctgtattccagctggaaatgaatccaaccaggacaggaaatgaatcccctagactcctatatgggcaagggcaggcctgggacagaggggcttagctagtccatccaagcgtggagctgattgatttgagtccaaggcgatgctaaccattctgccccgactctagctctgtgtacgggcatgtctgtgttttgaatggctgagggttcaaagccagaaggagttagttctcctgagaagaggctgcagcctcctggtctatctgcagagctcatcgctttaggaaagtgactccccatgaatctgatgatgtttctgagacttgccttccatagctgtcattcaaactaggaccatttatcaaaatgagccgagtgcatagcacgttccgggcgccggatgcttggatcacattgatgaataagggacttcaggggctcccaggtgtgctgtgtgtgtgtggtggagagtgtgcaggggccagaggaatgaacaaatcatccaatactgtgagataaggacttcgctaaaggtacgattgaggtgttgtgagattcacaggaggtagagatctgggtgatcctcctctggttcaaggcctggctccctgggtctaagtttctcagaatcccacttcaccatgcatcctctctcttctgtagattgcatctttcttccccactggctctttcccatcagcacctaaggatactccagcatctctctcctttaagaaaacagcctcaggccaggcgcggtggctcacacctgtaatcccagcacttagggaggtggaggtgggcggatcacgaggtcaagagtttgagaccatcctggccaacatggtgaaaaattgtctctactaaaaatacaaaaattagctgggcatggtggcacgcatctgtaatcccagctacacaggaggctgaggcagaagaatcgcttgaacccgggaggcggaggttccaataagccgagatcatgtcactgcactccagcctgggtgatagagagagactccatctcaggaagaaaaaaaaaaaagaaagaaaagaaaacagcctcattgcgtctacatcattcttttgctgttggcttttctcagccagctttcttggaagcactggttgctctgcctgactcagtttccttgtttatagggtcttctccaacctctgcggccaggtctctgccctgcttactgtctcatttgcacctgcgggatgttactttattttattttttgaaacagggtcttgctctgtcacccaggctggagtgcagtggagctatcatagctcacttcaatctcctgggctcaagtgatcctccttcctcagcctcccaagtagctgggaccacaggtgcaccacaccacgcccagcaattttttttgttttgttttgttttacattttgtagagatagggtctctctatgttgccaaggctggtctcgaattcctggtctcaagcaattctcttgctttggccttccaaagtgctgggatcacaggtgtgagccactgcacctgccctcctcctcctcctccttctttttttttgacggagtttcgctgttgttgtgcaggctggtgtgtaatgacacgatctcagctccctgcaacctccgcctcccgggttcaagcgattctcctgcctcagcttcccaggtagctgggattacagatgcccgccactacacccgggtaattttgtatttttagtagagatggggattcgccatgttggtcaggctagtctcaaactcctcacctcaggtgatccacctgcctcgacctcccagagtgctgggattgcaggtgtgagccacggtgcccagccacctccttcttctaattatgatcttccctggggctaatttcacacattgccactcaaggtcacacaccttacctttctcactacagcagaggaagcatttctagaacctcctggttggggctggggtcccatcacatccacactgtggctgggagaagggaagggctttggtcaatgttatcaatcatcagctccagttgggcctgaggcatataagttcaaggtctcgtccacagtgtgctggcccagactgggcagagccagtggctggcaggggttgccggtccactccagccctcaccgttggggccatggggtgggttgattgggttttgcctctgcttagcctgttatggtgatggtgagtagagatggatgggctgtctatccacggagcactttttttttttttttttttttgagacgaagtcttgctctgttacccaggctggagtgcagtggtgcgatcttggctcactgcaacctctgcttcccagtttcaagtgattctcctgccttggcctcccaagtagctgagactacaggtgcccgcctccacgcccggctaatttttgtattttcagtagagatggggtttcaccatgttggcctggctggtctcacacccctgaccttgtgatccacccgccttggcctcccagagtgctgggattacaggcttgagccaccgcacccagcctcagggagcattttaaacttatctccttttcttttttgagatagggcctcactctgtcatccaggctggagtgcagtggtgccatctcggctcactgcaacctctgcctcctgggttcaagcaattctcctgcctcagcctcctgagtagctgggattataggtgtgtaccaccacacctggctaatttttgtatttttagtagaaagggggtttcaccatgttagtcaggctggtctcgaactcctgacttcaggtgatctgcctgcctcagcctcccaaagtgctgggattacaggcgtgagccaccgtgcccggccttaacttcatgtatttatttctttttctcttcctggggcctccagggctgtggtgtcatcaacagttccccgtactgtttactgggacccccatgcttccggcccccggtgacacgtgggagctcagtagctggcagggcaggacccatcatgagagtcccagaactggggaacaccgagaagcagagaatggggccccacgcagaccaggagccccatgcctgagctgcaaggagggacttgcaggcaaggttttccacctggatctgttcagatgcagtgaccttgcagagtgatggggccgggacacttcgtgcatcaaagcacataattaacaataaaaaggaaaggggcccaagaagaggggtcccagaagagaggtccaagtttcctagagggcaaggacaggccatgattgacaagccagaagtgggctcatgagaactgggctttctctgccaatagttgtgctgtcctgacctaagcttaccttctctaaatgtgtcaatctagaaagagaacagggctttggttttgcaagattaaaaaggtctgcaaattaattgcacacacattgtaataaatctccacccctttttcatcttgcaaattctatgaattttggatgcctcatataagtgaaatcacagtgttagtttttttgtgactgccttatttcgcttagcattatgtcttcaagattcatccatgtagcaagggtcagaatttccttcctttaaaggctgaatgatattccactgtagggatattactatccattcatctgccatgggacattgatttgggttgcttttacttcttggctattgtgaataatgctgccataaccataggttgcaaatatcccttccctcccctcctttcccttcccttcccttcccccctcttccccctcttcccccttccctccccttttctttttctttctttcacttgtccttcccttcccttccctccctccctttcttcttccctccctccctccccctcttccttccttccttccatccttccatccttccatccttccttcctccctcccgtcccctttctttctttttctctctctttctttcttttttcccctccctctctcccccctcccttccttcctcccttccccttttccttccttctttctttctttcttcctttctttctctctctctttcttccctccctcccttccttcctccttccttccctccctccctcttttttctcttttttcttttctttctttctttctttctttctttctttctttttctttctctctttctttcttcttttattctttcttaatctttctctctctctttcattgtttttcttttcctttttttgtgacagggtcttgctctgtcacccaggctaaattgcagtggcacaatgatagctcactgcagcctcgacgtcctgggctcaagcaatcctcctaccgtagtctcccaagtagctgggtctacaggcatgtaccaccatgcttggcaaattttcaaattttttataaaaatgggatcttgccatgttgcccaggctggtatggaactcctggcctcaagtgatcctcccatatcagctttccaaactgctgggattacaggctcatgccaccactcccagctaattttttatatttagtagagatagtgtttcaccatgttggtcaggctggtctcgaactcctgacctcagatgatccacccacctcggcctcccaaagtgctgagattacaggtgtgagccaccaagcccagcatctaattcttattttattattattttttttgagatggagttttgctcttgttgcccaggctgaggtgcaatggcgcgatctcagctcaccacaactctgcctcccgggttcaaacgattctcctgcctcagcctcctgagtagctgggattacaggctcctgccaccacgcctggctaattttgtattttcattagagatgaggtttctccatgttggtcaggctggtcttgaactcctgacctcaggtgatccacccaccttggcctcccaaagtgctggaattacaggcttgagctaccgtgcccggcctctaattcttatttttattttattcatttattttggagacagtgtcttgctcggttgcccagatgatcatagctcactgcagcctctaactcctgagctcaagtaatcctcccacctcagcttcctgagtaggcgggactacaggtacacaccaccatgcccggctaattttaaaattgtttgtagtggcggggtctcgctatgttgcccaggctggtctcaaacttctggctccaagtgatcctcccacctcagcctcccaaagcactggtattataggtgtaagtcaccacccttggctttaagcttctaattctttctttcttttttttttttttttttgttgggacagagtctcattctgttgcccaggctggaatgtggtagtgcgacgatagctcactgcagccttgaactcctgggctcaagcaatcttcccaccttagcctcccaagtagctgagactacaggtgcacaccacctgtagctctgctaagttttaaatttttcacagaggtaggttctcgctatgttgctgaggctgctctccaactcctgggctcaaacgatcctcctgcctcagcttctcaaagtgctggcattgcagatgtgagccaccacgcccaggctctctgcatcattttaacaaagagtcatagcctctgagccctgggctgtggcggggccagccctgtttccctctcacactccagtgcaggacaacatcagcaagtgctttcagattacaggtgtgagccactgcgcctggtcaggagttcaagaccagcctggccaacatggtgaaactctgtctctactaaaaatacaaaaaaatcagtcgggcgtggtggtgcatgcctgtagtcccagctactggggaggccaaggcaggagaattgcttgaacccagggggcagaggttgaagtgagccgagatcatgccattgcactccagcctggacgacaaagtgaaactgtctcaaaaaaaaaaaaaaaaaaaaagaaaagaaaaagaaacaaaggaagtgctctcggcctggcgtggcagtgatataagacatcaggccccttcccatgtaaccggaaacccatgaacagagcctggtggttttacaaacaggaggagcagaatggagaacagagaatctcatcttctgggggtccacacgtgttccccaagattgtgggaatgagtgtgtgcagctggcttgggcaagggtgccgtggcactgcaggggccagcagctttccacctatccaggacttgctaacaacttgctaacggccctgactgagatgactcagtttcccagctagaactccccagcagcaaatgcaggcttggctgctgtatcattgatcactcccagcctgtccctgccaagcaattctatatccctcacctgcttggagagtggaaaggccacaggcgtcaatagcctcagacccagcatttaaatcctggctccacacactagttctgtgggctggtcgcttcctgtctgaacctccatttgctcatctataaagtgagcacagcgatacctgtcttgcagaattgtcaatatattgtatatgaaatgaggtgacaagtacctgatgtggcacaattggtggtacagagtaggcctgaataaatggcccttgttactgtcattccccgacctgcccagcactaggcacaatagtgttagaaacccacattgattagccgggcacagtgactcatacctgtcatcccagcactttaggaggccaaggcaggaggattgcttgaggccaggagttagagactagcctggccaacatagaccccgtctctacagaaaactttaaaaattagctaggcatggtggtgtgcacctgctactcaggaggcaaaagtgggagaatcgcttgagcctcggaggttgaggctgcagtgagctgtgattgtgccactgcactccagcctgggtgacacagcgagaccctgtctccaaaaaatatataaataaatacagactgactgatttttgtattttccccttcaggatatagatgcttaggactgagatgagaatgctaagaccccggcatgttctggtgtgtgtgtgtgtgtgtgtgtgtgtgtgtgtgtgtgtgtgtgagagagagagattcagtctctgccttttcatgcaacgtgaagggtctcagtatggatcccctgagtaccagaaagcaccctgtcaggtagagggtgccaggaatccccggtcttgctgccagcgctgggagccctgggctgaggtccagagttagtgaccccctgcaaagctgctgttttcctttagggagtggagattggttggggtttggagtccaaccaaattccccttggagggcagcccatcagcaacagggatgctgtgaacgtccctgggaggtggtgggttgtgtagacagaggccggaagtcaggaccttttgaagcagcattattgtcaggggtaaatacctgaggttcatcatctcacgccagggaaatcaaagacatggacccacaagaagtgagtttaagagcagaggtttaataggtgataaagagagaaaagagaacagccctccctcctgcagatagagaggggctgccgagtgggtcttctggtttcatggcgaaatgcacagggcggggggaggatggggggtggtttatagatgagcctgaagaggcagagtctgatttacacagcgcccgagagattggtcagaccaggtgtgacgtttgcatagtgtgcgaagaagctggccatcccaccccaatcttttattgtgcagacgggttctctacctggctgctgccatcttgtctgttccttcctgtacacatggttgacaaagaaaagggaagatggggccgggcgcggtggctcacgcctgtaatcccagcactttgggaggctgaggcgggcagatcacgaggtcaggagatcaagaccatcctggctaacacggtgaaaccctgtctctactaaaaatacaaaaaattagccaggtatggtggcgggcgcctgtagtcccagctacttgggaggctgaggcagcagaatggcatgaacccgggaagcagggcttgcagtgagccgagatcgcgccactgcactccagcctgggtgacagagcgagactccgtctcaaaagaaaagaaaaagaaaagggaagaaggagccgccatgttgaacctacctggcccccaggtaacccttttctattggcacggctgccggcatttacatatgcaagcttttagcttgcttacctgtgcttgtagattttcaggctgctttttgttagaaaagaaatgattcacacttgtaatcccagcactttgggaggccaagtctggtagatggcttgaggtcaggagttcaagaccagcctgaccaacatggtgaaaccccgtctctactaaaaatacaaaaattagccgggcatggtggtgcacgcctgtaatcccagctactcaggaggttgaggcaagagaatcgcttgaacccgggaggtggaggtgcagccagccaagatcacaccactgcactccagcctgggcaacagagcaagactcagtctcaaaaaaaaaaaaataaaagaaattattttgcagctgctttttattaaaaggaaacccttaccaaggactctcttacccccactatctgcctaaagaatttctttctagctcttttatcactttgtaagtgacctgcccatccgtttctcttctggaaatagggtcataggagtagccctgctggggaaggggcaccttggaggtctctgctccccgaggcagggctccgtgccgccaagcaaggcctccgtaacgacccactgagccctggttatcgtaaacttcctgcagaagggggcttaccttcccatgatgccatgtctagacacaaggtcaggtataagttatggagatgatgtagcatgttcggtggttaaaccgtaaaactttaatgagagatttctgtgtcttgaacatgtgctggggaaactgtgggaggagggagggggagacgcattcacttcctttccacttcttctctggccatctgtaggggtgcaggcaccgccctggaggccaagcccttggcgctcagctgagatttggtgtcagtgagtggcctccaccagacctggcagttcccaggcctggctcccattaagcagctagatggagctctgccctgctgcaccgggtggaccttggccaagtcacagcctcgcagggcctcggttttctcatctgtgaaatggggttgggagagagactctcccagcacaaatgtttccatctcctgatcttctatgatctggcagagcgcatcagcagacacgcatgttgagcagaaggaatgcctctctgagtttcagacctgcctcgtggggccctggggacactgtagggcagaggaatagctttatggactgtaaagtgctgtgcagacacacagccctcctggaaattctgggggtctctctctgaaaaggggtgaaagctatgctggtagctatttaggagatatctttgtggaaaaggaaatggagactgctgtggttttttttctgactccaaatacattgctccaattctctgacaccaccaccattccattcagacactactgggagttagagcagaccccagagtttaagggctcaagaccataagactgctcccacgtcagatgccggccataaacggggtgcccagtttacctgcacttatgcaaattcaagggtttacacgatttctctctttttttttttttttgagacagagttttgctcttttcgccctggtgtgcagtggcacgatcttagctcactgcaatctccgcttcctggattcaagcaattctcctgcatcagcctcctgagtagctgggattacaggcgtgtgccaccatactcagctaatttttgtatttttagtagagatggggtttcaccatattggccaggttggtctcgaactcctggcctcaagtgatccgcccacctcagcctcccaaagtgatgggattacaggcgtgaaccaccgcgcccagctggtgtccacgatttctgcctcatgtttggtaattcgctagaaccactcacagaactcaggaaagcactttgctgatggttaccatcttattgtaaaggaaacacttgagtagcagccaactgggagagatgcacgtgaagtggcgtcgctgtctggggtaaatactcaagattcgttgtctcacgaccatgggcaactaggacacagacacacaaagaatgatggtcagtgcagaagttgaatcagcgaaagcaagagaagagctctctctgctgcagagagaggggtcccggagaaatggattgcctttttttttgtttttttttttttttcgagacagagtctggctctgtcatccaggatggagtgcagtggttcgatctcactgcaacctctgcctcccaggttcaagcgattctactgcctcagcctcctgaatagttgggattacaggcgcgcaccgccatgtccagctaattttttgtgtagggagggggtttcaccatgttggccaggctggtcttgaactcctgacctcaggtgatccgtccacctcggcctcccaaagtgctgggattacaggcatgagccaccacgcccagccccgggtagcccttttctattggcatagctgccggcattcacccctgcaagcttctgtctttcttctctatgtctgctgcttgatttttcaggctgctctttgttagaaaagaaatgatttgggggctgctttttgttaaaagggaaaccttgccaaggactgtatcgccgttgctctctgcctaaataatctctttctatctcctgtatcacataggccagtatggagggtggggacgggatgtagagcttctctatcttttctgagtatccgctgtcccagaacattcaggtgcttaccaacctggaagctccataatctccactgttagggtttttatatggggtctcgttacataggctcgattgattacatcattggccattgttgattaacacaatctcatctttcttctcttcctgggggtcaaggttggagctgaaagttcccaccctctagtcacgtggctggcttctctggcccccaccctctcaccctgaagctgtctaggggcccagcagggatcacctcacttagcataaactcagatttgggggaaagaggcttgttatgaataacaaaacacactcctatcactcaggaaattccaagggtcttaggggctccacgctagcaatttcaacaaagaccaaatacatatattttattataccacagacacagaggcctttggagctgaggctggatgctactctgtgtactgaagacactcactcgggccttaaggtcaaggtacaggaggccctgatttccagcaatgacatttcacagtgccagcccccacgtgccataatatctgttcccatgcaattaagcataagggctttatacttgccttgtgcacatggctgagcaatggcagagatttgaatagggtggctgatgtggagccacatcacgatacaccctgtgtgagtgtgttaccggaaaggagtgtcatctagactcccaatagtgggttcttggatcttacacaggaaagaattcagggtgagttgccgagtatagtgaagctaagataatgtattagagactactcaattacagaataggctatcctcagaaagcagaaggaatacactcacgtcaaatacaatgcttgcttaaatagaataacagagctaagaataatgttttgttgttgttgttgttgtttgttttttttttttttttttttttttttgagacagagtctcactctgttgcccaggctggagttcagtggcacagtctcagctcactgcaacctccacctaccgagttcaagcgattctcctgcctcagccttcagagtagctgggacgataggcacgcaccatcgtgcctggctcatttttgtatttttagtagagatggggtttcaccatgttggctgggctggtctccaactcctgacctcaagtgatctgcccaccttggcctcccaaagtgctgagattacaggcatgagccgctgcgcccggccagaataaggtcttacatgctttattccaaaggtttgtgatcaggttgtgacaggcaattagtattgctattctcttgtgtaactgttgatttcagcaagaattaataggtatgctattatctttaaagcaaaactttttttttgagacaggatcttactttgtcacccaggctggagtgcagtggtataaacatggctcactgcagcctcaaccgcccagggtcaagctatcctcctgcctcagaccgccaagtagctaagactataggcatgcgccatcacgcctggccagtttccaaatttgtttatagagatgatggtttcaccacgttgccaggctggtctggaactcctgagctcaagcaatctgccgaccttggcctcccaaagtgctgggattacaggtgtgagccgctgtgctcagccttgaaacttatttttaaactaaggatgttttttcttcttaagatatcagggcatcaggacatctctttaagttcgaggtcttatttagttagttaactcatcccttccaccataaacaccctgtaaccaagagtgcctaacttcctgggaatgtaacctaccaggtttggctttatttggccattattcaagatggagtcactctggttgagactcctccaacaggtggatccattccgccatggaggggttgtgctaagcatgtatggactgaggccatcctggtaggtgaggaccatgtagctcaggtcatgcacattgcgcctcgggaaaatgcctcccaggagagcatggagcagctgggatgaggacagcccttccctcagccaactgttccaccatcaaatcgcatttacgaagtgcccacatgctcttaggagcccataaacaccgcaatctgtggctctaaccctcactccttccagtcgaagtgttgtggggccccaggggacctccggatctgcagagggggtgcacttgtctctgggtctcctgttcccacaagaaccacctaaagcattgcctgcgtttccccgacatggcgttggaatgttccagaatccctgagccttgctgtgcctttgtagttatttattgcctgggcctctcattcagtgcttctcttacaggcttggagttttcttctttttttctcaattgcctatatgtttatcttcccaactggtttatgagctgactatgggttgcatctttttttttttctttttttttgacacggagtctcactctgtcgcccaggctggagtgcagtggcacaatctctgctcactgcaagctccacctcctgggttcacgccattcttccgcctcagcctcccgagtagctgggactacaggcgcccgccaccacgcctggctaattttttgtatttttagtagagacagggtttcaccattcaccgcatggtcttgatctcctgaccttgtgatccgcccacctcagcctcccaaaatgctgggattacaggcgtgagccactgcgcccggcctgggttgcatgttttgctgccgctttttggtctgctaggaccccacccagaggagaacaaacactggggcttggcaccacctgcagtcaaacctggtcccaccacctctagttgtgaagttttggacaagggctcatacaggcaacctcagcactttgggaggctgaggcaggagaattgcttgaggccaggagttcaagaccagcccaggcaacagagcaacaccttgtctccacacacacacacacacacacacacacacacacacacacacacacaaacacacacaacaaaaaacaaaaacaaaaacaaaacaaaacaaaaaaaattagccaggtgtggtagctcatgcctgtagtcccagctacttgggagattgtggtgggaggattgctttgaggctgggaggttgaggctgcagtgaactatgattattccaccaaaccgcagctgtgtgacagagtgaaaccctgtctcaaagaaaaaaaaaaagatatttcaagcaagctatctactttttcagagcctcactttgcccatcaatgaaatgggaaaaaatgatgcatatcctccagagtgttggaaatatcctccagagtgttggaaagtagagaggctgcttgaatgtgtctggtgcatggtgggcacccatgaaacaggtccaatgccagcctgtgaaaagcatgtacggctggcaaagccctgagccctcaacatcacttccttttactttcccagtaaccctgggcagcaggcaggcaacactgtgttcccattttacagatgagaaagatggggtcaggtggttaagtgattggatgaaggccacatagatagtaagtgaatgattgatcctacaccagaaaccgggcttgcttttcctggcaccatcctctctgaggaggaaatgaatgaatcaacaattacaatacagggttgggctgggtgtgatagcttatgcctgtaatcccagcactttgggaggtcgaggtaggaggatcacttgagcccaggaagtcgagaccagcctgggcaatatagcaagaccccatctctaaaaaaaaaaattagccaggtatggtgtcacacacctgtagactcagctactcagggggctgaggtgggaggatcgcttgagcccagaagtttgaagctgcattgagctatgatcccgccactgcactccagcctgggtgacagagccagaccctgtctcaaaaaataaatgaataaaataaaataaaatacagggttgcactgtgtctggggctatggtgaaaggcctctgcatgatggtagagggaagaaaagatttctattctcatccattgctaagtccatagttaatacccctgtgacacaagatagattaacaagagaaaaacatgcacatttgtttaagttttatgtgacataggaaacttcagacatgaagacccaaagaaacagggagacctgtgtatttttatgctaaatttgataaaaaagcggacagctgtggagaagtgtgattgcacaaaaagagtatgatctcaggccaggcgcagtggctcacgcctgtaatcccagcactctgggaggccaaggcgggtggatcccttgaggttaggagttcgagaccagcctagtcaacattgcaaaaatccatctctactaaaaatgcaaaaaattagctgggtgtggtgtggtgggtgcctgtattcccagctactcgggaggctgaggcaggagaatggcttgaacctgggaggcagaggcggaggtgagccgagatcgcgccactgcactccagcctgggcaacagagcaagactctgtctcaaataaaaaaggtatgacctcatcataacaaactgggtgaaacttagcaaggcatgttcagattcttctctgtgtccctgtgtcctcagagacaaggatgttcctttcctttaggtagggagggcacctctggggtaaaagtcttatgatctactttagaggaaagtcagagaattcttttatgacccgtgtcaggggaaaagtgtgggggaaagtcagaaagaacttcctgcttctgctgttttctcaaacaccaacataccatatttaggggtacagtgtcctgagccccactgatggagagaagcaggggctgttatttccactacagaaggttttcagaggccttattcacacacaaagggtgagggtggatttcagggccactaagttacgggctggacgcgagtgtgtgtgttcgatgtgtgtgtgcgtatattgtgggcctggtgtgtttccgtgttgttgtgatgtgcatgtgtgcctactgtgtattggatgtgcgtggcgatgatgcatgattctgtggtgattccttcctttccttccttccttcctttttctttctttctctttctttctttctttctttccttccttccttccttccttctttctttctttctctctctttctctctctctctttctttctctctctctttttctctctctttctttctctttctctctctttctttctctctctttctctctctctctctttctttctctctctctttctttcttctttctttttttctccctctctctttgtctctctttctttctttcttcttttcagtatctcatgttgtcacccaggctggagtgcagtggtgcagtctcagctcactgcaacctctgcctcccaggttcaagtgattcttgtgcctcagcctcttgagtagctgggattacaggtgcatgccaccactcccagctaattgtgtgtgtgtgtgtgtgtgtgtgtgtgtgtgtgtgagtagagatgggtttcactatcttggccaggctggtcttgaactcctgacctcaggtgatctgcccacctcgacctcctaaagtgctgggattataggtgtgagccacagtgcctggccaattctgtggtgattacatatatgcccatgtgttagtgttgtcaaaagacaaaatcataacaaatgtagttatagatctaattggtttttattcaaggtttatcaattcgggcagtcttcattctataaaatagaataagagcttccactgcaatagcaaaacactgggttttgtaagatggaaacaaggaaatagaatgataggaaaaaaccgggttggttaacatcgggttacttctggttacttggttactttttttttttttttgagacggagtctcgctctgttgcccaggctggagtgcagtggcatgatctcggctcactgcaagctctgcctccagagttcatgtcattctcctgcctcagcctcccgagtacctgggactacaggcgcccgccaccacacccggctaattttttgtatttttagtagagacggggttttaccgtgttagccaggatggtctcgatctcctgacctcgtgatccacccacctcggcctcccaaagtgctgggattacaggtgtgagccaccatgcccagccattttttttttttttgagatggaatcttgctctgttgcccaggctgaagtgcactggcacgatctcggctcactacaacctcctctgcctgggttcaagtgattctcctgcctcagcctcccgagtagctgggattacaggcatgcaccaccacgcccggctaagttttgtatttttagtagagaccagatttcaccatgttggccaggctggtcttgaactcctgacctcaggtgatctgcccgcctcagcctcccaaagttctgggattacagccatgagccaccgagcccggcctctggttacttttttgtaagggttaaggcaagggggatgtctgtattatactgactcaggtagactggaatctcctcttttcagggaaaactggtctgttagtgtgtgaattgtaaggtattgtgtgtctgcgtgggatatgcgtgctgtgtgtgtagttagtgtgaatgatacatggtcatgtttgtgcgtgtttgtgtgtgtgcattagcatgcggagtgtgaggtttgtgtgtgtgcagtttgcacagatgtgcagtgagtgcatagtatgtgtattataagccctcagtgaccctctcttgggctggttggatctgcctgagaaaatttgtctactcttgtatctggagggtgtacatctggccatctgccagctaggagctgagggggaggaagggtgtatagggagtatcttgatattcagtgtctaaacttgcacttaattcccagttttcagtatagttctcagaccctcaatcatacctggtattcttcagtcatgagattcccccattttttctctcctaagaataagcctccagatttctgcctgagtgaaggggaggacacagagacatcctctttctttgagactttgaacctatcttgttttcagcacctctgtataccttcatttgtccaagtacttggtatgttgccattgtgggaggggtgttctgcggtgtagatgagattttctcagctttccctgacctttcgtgggtcagtaaaatcagctaccatttgtccatttgttttgcggtttccacatttctgttgctgttgactcttttacccttgtcaatttctttgttcttgtccattgatatttcttttttatttatttattttttgagacggagtctcgctctgttgcccaggctggagggcaatggcaagatctcgcctcactgcaacttctgcctcccaggttgaagcgattctcccacctcagcctcctgagtacctgggattacaggtgctcaccactacgcccacctaatttttgtgtttttgtagaaatgggtttcatcatgttagctaggctggtcttgaactcctgacctcaagtgatccacccacctcagcctcccagcgtgctgggattacaggcatgagccgccacgcccagctcattgatatcttttaagaaaacacaaacctttctgtgacttgaggtgcggtttcgggagagcgtggtggtaaatgtgtgtctgctatctgtgcccaaaacagatgagcagaggaaaataaagtgtccttttgtaaaattaggtcatgacacaggacagccagactcagtcacccttagtgtccctctcaccattctaatggtaaagttaaaactctgaatctccaaaatttacataagaaatatttcaaattaaccgaaagtacacaaaacgccccataaaatacatatatacttaccactaagatttaacagttgttagcattatgtcatatttgcttcagtgtttcctttttaactttttattttgaaataatccagaacagtgtattttaaaggaataaaatgttatgggtatggctaaagtcaggtatcctgtatgcgttttctctttttcaaaatgtgacactaatcaagttggtgggtgtcattcctagacaaatttctctacttttactacatatatatttatagctataaacaaaacatactattgtgtgttttaaaatttgcataatgatgttctgctgaattcatcattttgtagcttgctttttcacttgacaaaatagtagtaagatctatacatattgactcttttgcctctcattgattttaactgctttatagtatttcactgtggggatatactgccatttatttatcattcccctactaacagatatattgcttctgctttttcacaattacaaacagtgctgcagggactacctttgaatccttgtgcatgcgagcaaaggcttgcccagacagaaaatacttacagttaattcttctacatattgtcaattgctctccaaactcagtgttccaatttccacttcaccagcagtgtataaaagttttccattattccacagtctagccaatttttggtgttactagaattattacattttggacacaaatggatgagaaactgtatatcattttaaaatttgcatctccctaatacatccaaatttaagcctctttcagttttgtttgttcaaaaattagtctttagacatcgctcttgaatgatggtttagctgggtataaaattctgggttgacagttatatttcctctgcattttggagatattacaccattatcttctagcctctattgttgctgttgaaagatttactgaaggtgtctttggaggtaattcattccttttctttggttgattatagtattttgtcattatatttggaattctgcagagccactatgatttggtgtctagatatgtatcagtttacttacccatttaagactctttgtaaatcttgaatccttgatacatgaggatccacatatttttaaatcaattccagaaaacctcaagctattatctcttcagattttgcctctttataaaatttcctctattctttgtttctggaactccttttattatttgtttgtttgcatttttattggcatatcatcattgtacatattttgggagtacatgtgatattttgatatgtgtatataatacataatgatcaaatatccatcacctcaaatatttatatttttcctgtgttggaaacattacaattcttctcttttagctattttgaaatctataataaattattgttaactataatttctctactgtactattgaatactaaaacaattttttttaagagtcagggtctcactagtttttccagactgttcttgaactcctgggctcaagcagtccttccacctcagccttctaagcagctgggatttagaacttattccttctatctagctgtatgtttttacccagtggaagttctttcagataatatcctcattctctcattctatcctctgagtctctaaactgctcataatttctatttcttttgcattttgggcaatattctcagatctagctttcattttatttgtcttctcttcagtgtgtccaataagactttttatctgccaatttaattattattattctaatttttccaagttatacttagttccttttcacttctaccctattttcaactccttcttttagctctttgatatttttaaacattcttattttacacatgtcatattttatttcatattagagtttttattttctcatgttgctggggctttaatctttctgattgttttaatttatttttgtttgtttgtttgttttgagacagggtgtcactctattgcctagcctggagtgtcatagtgcaatcctggcttaccataaccttgaccttctgtactcgagtgatcctcccacctcagcctcccaagtagctgggactataggcgtgcgtcaccatgcccagctttttggggggtattttttgtaaagacagagttttaccatgtagcccaggctggtctcgaactcttgggctcaagcgatcctcccgccttggcctcccaaagtgctgggattacaggtgtgagccactgtacctggccttccctggtgcttttatttcctctctcattgttgcttgtttccttgtttgttttgtaattttttatggttaactcatctttgtcacagcttgtttttcaatgagaaaacaagcagtccggattgtggaaccattcttccacaaagctttgtaaggcactccagaatatcctgggcaggagttgattttcatgttagtttcttgatttgtgggtttctggataaatgctagtgaatttctgatattaattcaaacctcagatccaaacaaggcacaggcctgaggtttggatgttatcaggggagattttctttttaaattcaggcaaagaggagatgccacgttgttccctcactctgctgatcagcagacagttttctagcaaatctttcatggaaggttgtcattccttatttcatgggttatcagaatgcatgggtgtaaaaccccacactgaaacagctaagttactatgatagccaccccacccaaggtcagttatagcatctttatgatttcatatagcagcttctgtgtcttcagtttttctctttattcttgtaagcacctcctttctttcttgggaactcagctatgcatttatcacaattatatatatatatataattatatagaatctcccaaaatatatatatatatatatataattgaaacagggactcactgtcaccccggctggagtgcatggcacggtcatagctcactgccatctcaaactcctgtgctcaagcgatcctccctgctcagcctcctaagtagctgggactacaggagcataccaccacacccagctgatttttaaatattttgtagaaacggggtcacgctatgttgcgcaggcttgacttgacctcctggcctcaagcaatcctcctgcctcagtctcccaaagtgctgggattacatgcatgagccaccccacccggccaatttttggtatattttgtccagcattccaaagtgtttgtagcagaggtttttctggttatcttacacaccatcctgttaaagaggtatctttttaaccttcttaagtttcaatttctttatttagacagtgggaatattgtcctttctacaaagaattatcgggactaggtaaggatttaagtaaacaatctaaccatgtggtaagtgcaccataaatgctaacaataatgattattattacactaatatcatatgtactctttttcctttttttttttttcctagaccaagtctcactctgtcacccaggctggagtgcagtggcatgatctcggctcactgcaacctctgcctcccgggtttaagcagttctcctcccgagtagctgagattacaggtgcctgccactatacctagctaatttttgtattttttagtagagacggggttttgccatgctggccaggctggtctctaactactgacctcaagggatccacctgccttgtcctcccaaagtgctgggattaaaggcgttagccaccaccgcgcctggccttctttttcctttttattgatgtttttatgtagctcagcatgaggcctttgaaaataaaatagcccattttctctcactgtaagttgcaatctttaattgcaccaaattcctcccaagaaggaagtggcagaaaggcaataaaatgagaagtgagtgctcttatattgtgtgagttacattaacatacattatctcatatcacccctatcataatcccatgatgcaggatattgtaatagtcaggatggactaggttgcactttggaaacaaacagtaccaaggttttagcaggttagcccagcacaagttcctgtcttactcctgcttcatgtgcagtgctggtcagtggctgagcatctcagggctccttagggtgactcacgcctgtaatcccagcactttgggaggccgaggcgggtggattacttgagaccaggagttcaagaccagcctggccaacatggtgaaaacctatctctactaaaaatacaaaaattagccaggcgtgttggcacacgcttgtaatcccagctactcaggaggccaaggcaggagaatcgcttgaacctggaaggcggaggttgcagtgagacaagatggtgccactgtactccagcctggacgacaagtgagactctgtctcaaaaaaatgaaaaacaaaacagagttccttaggcacagaagttttaccatctggcagctgtgggatgcctgggaagttgcgtgtggatcttttacggcctcaacctcttacaacttaactggtgcaaacaaatcatatgaccatggtctgctttaagggagcagggaaatgtagggaagaaaatggggcatttagtcactacatttgtctctgtcaccctcaaaatagaaagaaagaaattagctttttttttttttctggagacagagtctcgctctgtcacccaggctagagtgcagtggcatgatcttggctcactgcaacctccgcctcctgggttcaagcgattctcctgcctcagtcgcccaagtagctgggattacaggcacatgccaccgtactcggctaatttttgtatttttagtagagacggggtttcaccatcttggccagactggtctcaaactcctgacctcgtgatccacccacctcagcctcccaaagtgctgggattacaggcatgagccactgtgcccagcctttttaatttaattttattatttttttaaagagacagggtcttgctctgtggccaagcctatagtggagtggcgtgatcatagctcattgcagccttgaactcctgggttcaagccatcctcctgcctcagcctcctaagtaggtgggactacagatgcatgccaccatgtccagctaactttgttttttttttgagacagtgtctctcattgtcgcccaggctgctggagtgcaatggcgcgatctcagctcactgcaacctccacctcccgggttcaagtggttctcctgcctcagcctcccgagtagctgggattacaggcacacaccaccactcctggctaaatttttgtatgtttagtagagaagaggtttcactatgttggccaggctgggctcaaactcctgaccttgggatctgcccacttcggcctcccaaagtgctgggattacaggcatgagccactgcacctggccccagctaactttttaaagtgtgtgtgtgtgtgtgtgtgtgtgtgtgtgtgtgtgtgtgtgtagacaaggtctcgctgtgttgcccaggctggccttgaactcctggccttgagtgagcctcccacctcaacctcccgaggtgctgaggttacaaatgtgagctactgcacctggcactagaaattagcttttatttacactttctaagcattcacactgtgcctggttcaggtcttacattctctttagactctcagcaatgctgtgaggtagctttgctgatggagaaacaaactgtgtctcagagacattaaggaacttatgcaagatgccatgctgaagaaatgaattagtagctgtgccaaaatttcactccacatcctatacttcttattttattattattattatttttgaggcagagtctccctgtgtcgcccaggctggaatgcagtggcgtgatcttggctcactgcaacctctgcctcccaggttccagcgattctcctgcctcagcctcctgagttgctgggattacaggtgcccaccaccacacccggctaatttttgtatttttagtggagacagggtttcaccatgttggtcaggctggtctcgaactcctgacctcgtgatctgcccacctcagcctcccaaagtgctggaattacaggtgtgagccaccatgctgggccctttattattatttttagatggagtcttgctctgtcacccaggctagagtacagtggcacagtctcggctcactacaaccgtcacctgggctcaagtgattctcctgcctcagcctcccgagtagctaggattacaggtatgtgccaccatgcctggctaatttttgtatttttaattaattaattaattaattaatttttttgagacagagttttgctcttgttacccaggctggagtgcagtggcacaatctcggctcactgcaacctctgcctcctgggttcagatgattctgcctcagtctctgaagtagctgggattacaggcatgcgccaccaagcctggcaaatttttgtgttattagtagagacggggtttcactatattggccaggctggtctcgaactcctggcctcaagtgatccacctgcctcagcttcccaaagtgttgggattacaggcgtaagccaccatgcccggcctcacatcatatatttctaccgggggagagaaagagtcagaaaaaaagagaagcatacatggaggaaggagagagaaggccagaggtcagctctgcacacgccggtgctgagaggtgatgctgcctcacctgcctgagccctgggagcagtcaggttccagctcacctgcgtgaggtgctcccagaggactttcacatcaggccagacacatgcatctttggagacacattttgacgtcaggcatgaacgctgagtgacaagtatgagtttgggtctttttcgtcataggctatgatgctgcaggggcaaccaagactcccctgggacacacgcttgtgagctaatggaccagaaagggtgtgatcctcatagtcgcttccttctctgtgcccccagtagcttgttctggcctctgttacaggtcttgccacccaactccaactcccctgcctatggctgcctttgtttacctgccgtcatctgatctctgcatccccagtgccctggacagggtctggccctgaagagccctcaggaaaggctctttggtgagacagatggacagttctggcaaaaacctgtatgtgctggggctacaggtgttgggggtgggagcagtgggaggcagagggctgagatgagccgaggcccagccgcggcagccatgtgaccttgggattgtcccatcctgtctctcaacctctgatagtggtgtggggtgtaaagtgatctcagcggagcccgggcacgatggctcacatctgtattctcagcactttgggaggccgaggcaggtggatcacttgaggtcagaagtttgagaccagcctggacaacatggtgaaaccgcgtctctattgaaaatagaaaaattagctgggcacggtgacgggcacctgtagtcccagctactcaggaggctgaggcacgagaatcacttgaacctgagaggcagaggttgcagtgagccaagattgcagcactgcactccagcctgggtgacagagtgagactgtctctaaaaaaaaaaaaaaagtagtctcagattctctgggattttctgggattttcggatccgtcttcaccctctgggcatagttgacccttgggaagggaacagacagcgatcttcagtttcacaaggggactaagctcaactgttcattccacgtcccccccaaccccacagcctgaggctgtccgtgtcataccccatagggagctctgaagcccggtcttggggttcacaggccagcctcagcagagacattgaggacagtgggggctccaggtcagacttgcacaggcaggtccctgcacaggcagctttgcggtggcgggaagggctggagacagccctcacccgcccgccctggccctgccgtcagcagctgcagggaagaggaccgggcgcatttatagaattcctgcctgcaaaggccatgcagttgttttaaattagcatacaaatcgacattagtgtagtacatctgttgttaatccacatcccggtggaacggagatgccaacacgccttttattaggcacgtcgatcccataatgtcctttctccctgcctttgtcttctatcagagtccgtaatgggttccaggatgtcttttattttgctatggaccacgtttcctcctgcccagcggatcagaaacgtaatggattccaggatggaatttatgttcctttggaatcagaccctgtacgatgaattctaaagccttcgggcaaatctccagggaggccgtggccctgtgtttgcccccatggtcatcagacaggcaccgggaacccgggcacagtcccagggctggagggggaggaagggagcctgggccgacagctcccaattaagggaattccaggcaggcgtgggaggagaggccaggggtgctggtggagacagacagggaagctgggaagatgcagggcggggaggagggggcacagatattctagaaacccaggaaccggcagcaccagtgtttctggggctggtcacagacactggacaccagtttgcgaggtcctggagaaaaggaccttgaccctgagtatcccagcaggcctggggaggagggcagggtgttgtgagccagagactgcccttggggctaaccaggccgggactaagatacccagctttaccctttgctcatggcatggccctggagagtcactgtctcttgctgaggcttggattccatagcctgcaccccatcaccccgtgtcagcaccaagggctccccagccagcatgcctcctctgcctgctaccaggccttcaaccagtttcctcgggttctttcaaccccctctctcacgacatggctctcggtgccctccctgccatcttggctccttctagggcacactcgaggggccccatctctctcaagagaaggactcaaaccatccatgaagctggggctgtggagggcagggtccaggactctcctcccacctctgagatgccgcgctcctgtgcaaacctgagaccctcggccactctggccaccactgtgtccccagggcctccagtcctccagccagccctgtggttggccaccctgcccgtaagataagcccacgccctgtcactggggctggaggggctctgagcagaaaagatcaccttcaggggcaggtttggcccccaccacaacactgattttccagaccacaaagtgaacccaccctgcacccaccggctatcacagtatcgttttttattttgttatagagatggggtctcactatattgcccaggctggtctcaaactactacagtgtcttttacattgaaggctttaaaaaaattgtgattaggctgggcgcagtggctcacgcctataatcccaggactttggaaggtcaaggcaggcagatcacgtgaggtcagtagttcaagaccaccctggccaacatggtgaaacccccatctctactgaaaaaaaaacaaaacaaaaattaggcagatgtggtggcgggtgcctgtaatcctagctactgggaggctgaggcacaagaatcgcttgaaccctggaggcagaggttgcagtgagctaagatcgcgccactacactccagccttggtgacagagtgagactctgtctcaaaaaaaaaaagtaattaaatatacataaaatacattttaacattttaatccgtttttaattttatttaatatatatatatatatatatatatatatacacacacattttttttttccagagtctaactctgtcacccaggctggagtgcagtggcgcaatctcagctcactgcagtctctgcttcctgggttcaagtgattctcctgcctcagcctcctgagtagctgggattataggtgcccgccaccacgcccggctattttttgtattttcagtagagacagggtttcaccatgttagccaggctggtctcgaacccctgacctcaggtgatcctccctcctcggcctcccaaagcgctaggattacaggcgtaagccaccgcgcccgaactttaaccagttttaagcgttcaattcagccgtgttaggtaccgtcacactgtcgtccagccatctccactgtccatcttcagaactttttcattgtcccaattaaattgcagacttttaaaggaggaaaaaaagtttattgtgtgtgtcctgtctagcgcactcttccaggttagttgtaccttttattgtctttgagccagtttacagctctgtaaagttgtgcagtaatcatgagaatggatttttgtccacgttcctgtaagttaattgtgtccggtggaatgcaattggatattgccctggggacaaacctgttttgcgtctatttgtaaattcacagcagcattccgtgtttgcctgcaagattccgtgcttctacgaatttgcctttgaaccgcccatggcatctgtctgctttgttccctctttgattaatgtgttaaataaaatctttgacacatgttcattttctacttgtatgagagccgtgattttttttttcctcttgtgggaatcagtcctttaacaacaggactttagtctgtgggattggaggagctgtggtttaacccctgagattcctcagccaaaggcactgtcccacatgaagttagaatatgtggagtccagctagggaaagaggtgccagatatattccatcctctgtcaccctaagagcaaatgacagtgattctgtgctcagcctgaccagagctgcaagagacctgagagcctctctccaactggctcatgttacaggaacagggtcctgatccagacgccaagagaggattcttggatttcacacaagaaacaattcatagctcacctcagctttgaactcctgggctcaagagatcctccttcctcagcctcctaagtagctggaggtatgcaccaccacactcggctattttctttctttttctttctttctttctttctttctttctttctttctttctttctttctttctttctttcttccttccttccttccttcctttctttctttctttctgtctttctttctttcattctttctttctctctctctttctctctttctttcttgtctctctttctttctttctttctttctttctttctttctttctttctttctttctttctttctttctttctttctttctttctttctttctttctttctttctttctttctttctttctttctttctttctttctttctttctttctttctttctttctttctttcttgtctctctctctctctttctttctttctttctttctgatggagacttgcactattgcccaggctggagtgcaatggcccgatctcggctcactgcaacctccgcctcccaggttccagtgattctactgtctcagcctctcaagtagctgggactacaggcacctgccaccacacatgggtaatttttgtatttttcagtagagatggggtttcaccatattggccaggctggtctcgaactcctgacctcgtgatctgcccgcctcggactcccaaagtgctggaattacaggtgtgagccaccgtgccgggcctttttaaaatttttaagtagagacaaagtctcagtctggctatgttgcccaagttggcctcaaactcctgagctcaagcgatcctaccaccagggcctcccaaagtgctgggattacaggaatgagcattgtgcccggccaacagtccatttttatgggcggcccatgataaagcagagaggcaggccaggcacagtggctcacacctgtaatcccagcactttgggaggccaaggtgggaggatcacctgaagtcgggagttcgagaccagcctgaccaacatggtgaaactcatctctactaaaactacaaaaattagctgggtatggtggcacaagcctgtaatcccacctactcgagaggctgaggcacaagaatcactcgaacccaggaggtggagataacagtgagcggagattgcaccattgcactccagcctgggtaacacagtgagactctatctcaaaaaaaaaggtcgggcactatggaccatggctcatgcctgtaatgccagcactttgggaggccaaggtgggcggaccacctgaggtcaggagttcgagaccagcctggacaacatggtgaaacgctgtctctactaaaaatacaaaaattagccaggcatggtggtgggcacctgtaatcccagctactcaggaggctgagacaggagaattacgtgaggttgcagtgagctgagatcacgccactgcactccagcctagggacagagaatggctctgtctcaaaaaaaaaaaaaaaaattagctgggcatagtggcacatgcctgtattcccagctactcaggaggctgaggcacaaacattgcttgaatgtgtgaggcaaaaaaaaaaagcactattaccttaagccctgtgagcctcaattttctcacctgaaaaatggggatgattgtgcatgctcccccctgcacggcatggtcagctgtgtttgaagccaccttcaactagatcacgagagctggttttgtgtattgcctcccaactcccgtgcaggggtgtcgtattggtggcttgaaattggccatgctgggagtatttacaccatggaaattgacagacactacagagagctggttgttaaacacttaccagcacaccattggtggccatcccaaatgtgtggttgtgttacaagaaaggggtcccaatagagaccccaagagagggttcttggatctcacacaagaaagaattgagggcaagtccacagtgcaaagcaaaagcaagtttatgaagaaagtacaggaataaaagaagggctactccatagacagagcagccctgaggggtgctggttgcccatttttatggttatttcttgatgatatgctaaacaaggggtggattattcatgcctcccctttttagaccatatagggtaacttcctggtgttgccatggcatttgtaaactgtcatggtgctggtgggagtgtagcggtgaggacgaccagaggtcactctcatcgccatcttggttttggtgggttttggccggtttctttactgcaaactgttttatcagcaaggtttttatgacctgtatcttgtgctgacctcctatctcatcctgtgacttagaatgctttaaccatctgggaatgcacgcagtagatctcagcctcattttgcctagctcctatttaagatggacttgctctggttcacattcttctgatagttggaggacctggcatttgggatgcatgtcccctctgaggtgtgggaactttggtacaacaggatgggtggacaggctggggtcctctggggaaaatcctgctgggatggaatgatgagggcagggtgctcacctggaggccaagacagtgggggccagaggaagccgctggtaagcctggatgttgaatttaagagggtgagaactgaatcctcttggaagtgacatttcctgctctttcctcttgtccagacagtagaatcttgacggaaaactactgttattttcccttaagaaaaagcaatagataaaaataatagcaaaaatcacacggaacatgatgaggatttgccactgtttcttggggagcctctaggtatgaggtgtggtgggcaaaccatggccatcaactactgtcaaaattattattttactttaaaacaattatttattattttttaaaatagagttgcaggccgggcgcggtggctcatgcctgtaatctcagcactttgggagactgaggcaggaggatcacctgaggtcaggagttcaagatcagcctggccaacacggagaaaccccatctctactaaaaatacaaaaattagctgggtgtggtggtgggcgcctgtaatctcagctactcaggaggctgaggcagaagaattgcttgaatcccggaggtggaggttgcagtgagctgagatcatgccactgcactccagcccgggcaacagagcaagactctgtctcaaaaaataaataaataaataaataaataaataaataaataaataaataaataataaaaatagagatggggtcttgttctgttgcccaggctggagtgcagtggtgtgattacagctcactgcagcttccagctcctgggctcaagtggtcctcccatctcagcctccaaagtagctagagctacaggcgtgcaccaccacgcccagctaatttttgataggggtcttgctgtgttgcccaggctggtctcaaactcctgggctcaagtgatccttcactttggcctcctggagtgctgggattagaagtgtgagccaccacacctggcccattgtcagatttagtcctcaaacaagatggaaatcatcattcccctttcacagaggagaataagaatggggaagagaggttactttattcagggacattcagccgggaaatgtcagagccaggatctgtctcaagccaaagtgtgtctttccccatctcactgcaagaagctaggacggaccaggctgcccacccccttccccctgcccttgcctccctccccaccccgcccactctatcagactggccactcttccctccttcctccatgcttaggccccagtactccacccttaccccttcagtgtttgcctggcaggctctagtccatctgcaaaggctcagctcagaagtccccgcctccatgaagccctcctgactactgggttcctgcagagctggcttttgccattagttcaagtcctcaccacactaggtgagaacagctgtcaccttggccagggctcttcgcttgtggacctctttggccgtctgctgaatcctgtagactcttactcagaacggtatttttaagtgcataaaatgagctatgaggattatcaatgaccatgaaatacagtgcatcggaattttgttttaaaaaatcaaattatggccgggcgcggtagctcacgcctgtaatcctggcactttgggaggccaaggtggaggatcacgaggtcaggagattgagaccatcctggctaacacagtgaaaccccatctctactaaaaaaaaaaaaaaaaaaaaaaaaaattagccgggcgtggtggcgggcgtctgtagtcccagctacttgggaggctgaggcaggagaatggcgggaacccgggaggtggagcttgtagtgagctgagatcgtgcctctgcactccagcctgggcaacagagcgagactctgtctcaaaaaaaaaaaaaaaatacagaatgatgagtgtgtttctttcctaacgcaaacagcaagatcccacagtaaggctgacaactttcagaatgttggagtagaaatgagcgggaaaggtatttcaagacagtggcaataattgtgtgaattcgattgggaacgaagacacaggtacttctacttctattgcattgtcgttttgttttgttttgttttgtttgagacagagtctctctgttgcccaggctggagtgcagtggtgttagctcactgcaaactccgctgtctggcttcaagcaattctccttcctcagcctcccgagtagctgggattccaggcacttgccaccatgcccggctaatttttgtatttttagtagggatagggtttcaccatgttgaccaggctggtctcgaactcctgacctcaagtgatctgctggccatagtctcccagaatgcagggattacagatgtgagccactgcgcctggctgtctattgcattgttgatgttgttgttactacattcataataggaagagatgctaaatcgcagtttggtgaaagtaaaggcgtagttctatttcctatcaaagttcacccatccctgatttctatccttggaccctggctaagagcctaggttacagactcagagccccttgaggggcaggattgagtttcgtctgcatttccagccaggtttgcacattgcagacaagctgactacagccaatcatgcaggtttggtgaatgggtgagagagtgaattaagtcaaggaagccacagcagggggcccagcccgctcctcctccagtcccagctcttccagctgcacttgtttaatggtatgaacgtgacttggcttggtcccggcgccatggctgggagcacaggctgcccagagcgtacactgcaggttggaagcgagaccctctctctgaatcagtgtctgaatgtgtgctgcctagagttggtcgtgattcatctcctctatggggagaggggctgccttcatctcagccctgggcttccttccccgtggcttccaaaccctccccctggcgaaaggcagcctgaaggagctgctgcggtttaagaaagtaattgacctgatattattctggcctggagaaaaagatcctgagtgttgtcttaaagaggcattacgttatctgctgagaatgtcaggagatcagggggatcggtgcccccctcccacctcaggtagaggagccatcagtcccagctggaacccaacacacagggctagagctttatctgcctgaggcagccaggatgtccggcagaacaggtgctggagaccctggtagtcagagctttccaaaacatgttgacttgatttccctctctttccaagagaagctgtcgagcaattcaagcttccagggcacctctggcggggggatttggtgcatgggcacaggcaggggctacgtatgggcagcctggggaatttttttttttttttaagatggagtctcgctctgtcgcccaggctggagtgcagtggcatgatctcggcttactgcaagctccgcctcccaggttcacgccattctcctgcctcggcctcccgagtagctaggactacaggcacccaccaccatgccaggctatttttattttttatttttttatttttagttgagacggggtttcaccatgttagccagaatggtctcaatctcctgaccttgtgatccgcccacctcggcctcccaaagtgctgggattacaggcatgagccaccgcgcccggccagcgtagggtatttttgccaccacatctggcatctggtcactctgtgcctagggccttcaaagtcctcacacataaccagaaacgtggctcaaggccgggcgcagtggctcacacctgtaagcccagcactttgggaggccgaggcgggatgatcacacgaacccaggaatttgagaccagcttgggcaacatagtaagaccctgtctctacaaaaaataaaaaaaattagccaggcctgcggtaccagccacttgggaggctgaggcaagaggatcacttgagcccaggagattgaggctgcagtgaaccatgattacaacactgcactccagcctaggcagcaaagcgagaccctgtctcagggaaaaaaataaaaaaggcggcttagcatgactaggcatggcccagttcccagcagcccacgtctcctggcaaaccggatgttgcatttcccaagaccatctgcttccatccagagtggagaactcctactggtcagagtctaaaggcagctgattcctggaccagtcggctgtggccagggccatggggttaatgcccgggtaactgaataggttcattgcccaatgcacacagcaggtcaatttaccaagacaccggattgcagcagagaaaaaggtttaatcatagcgtcactaaatgaggagatgggaggaaacctcaaatctatctccctgaggagtttggggctggggtttgggggttttggagtgggctgaagtgtggagatggttgatgggtggaagagtgcagggcgaggtcctgggactgagaggggaagaagctgtgttctacgctcatcctcttcctctgtggggtcttcaaactccacaggaaaggggtgcagatctagaccccaagagagggttcttggacaggggcggtggctcacccctgtaattgggaggccaaggcggatggatcacttgagccctggagtttgacaccaggctggccaacatggcaaaaacccatctctaccaaaaatacaaaaaattcccaggcgtgatggcgcgtgcctgtaatcccagctactcaggaggctgaggcaggaggatcacttgaacctgggaggtggaggttgcagtgagccgagatagtgccattcaacctgggcaacacagtgagaccctgtctcaaagaaaaaaaaaaaaaagaattcagggtgagtctgtaaagcgaaagtaagtttattaagaaagtagaagaataaagtccaggcccaatggctcacgcctgtaatcccagcattttgggaggccgaggcgggcagatcacttgaggtcaggagttcgagaccagcctggccaacatggtgaaactccgtctctactaaaaatacaaaaattagctgggtgcagtggtgtgtgcctgtagtcccagctacttgggaggctgaggcaggagaatcacctgaacccgggaggcagaggttgcagtgagccaagatcaggccattacactccatcctggtggacaagagcaaaactccatctcaaaaaacacaaacagaaatagttctggaaacatgacatgtgacccagggagcgggaggctcctcctgtgtcaagttcaccctattttgactaacatgtactgagcaccttgaaacccaggcgctgggctgagcctcttaaaggtatttaaccctggccacatgcagtggctcatgcctgcaatcccagcactttggaaggtcaagaagggtagattccttgagcccaggagttcgagaccagcctcggcaacatagcaaaatcccgtctctacaaaaaatacaaaaaattggccaggtgtggtggtgcatgcctgtagtcccagctactcaggaggctgaggtgggaagattacttgagctcaggaggctgaggctgcagtgagctgtcattgcacgattacaccccagcctcggcaacagagcaagaccctgcctcagaaaaaaaataaataaataaaaggccaggcgcagtggctcacatctgtaatcccagcactttggcagcccaaggtggaaggatcacttgagccaagaagttcaagaccagcttgggcaacatagctaggccccatcttacaaaaacattttttaaaaatttgctaggtgtggtgtcatgcacctgtaatcccagctacttgggaggctgaggcaggaggagcacttgagcccagatgtttgaagcttcagggagctttgattgcaccaccgcgctctagcctgggcaacagagcgagaccctatattcatgagtgttgcaatgagccaagtagtggaggttggcttttgaaggcagaaaaggactgagaaaagctaacacagagaacaaaaagccaattggtcatttcaaagttacttttcttgtaaaggttgaagcagaggatggcttcttcatcatgcaggctaaaactggccagtttggctattgtctctctccccggatttctcagcaggtcggataaggatcttagtttctttttggtgatgtgaatcttagcatgagtgactccattttggtttggtctgttggagcctagggcaggagttcagtccaaaccaatgacctctttcttatcagtttcatgtaacacagaaaaagtaaagccaaggctgcccctagtgctcagttcctcggggctccccctggacacccaacatcctgcctttggggacctcagagttacaccagaatgatagagagaggagacccaggtgtgcacagcccgcagagtgtggcatgagcactgcgcaagaattgggagccccggtttctcacactggctctgagcaccttggtgagccttgagtaagtgtccgatgcctctaagcgtttgtttgcctttctttgcatgagaaacagtgaccctgccggcgacaccaaggctgtggatgcatgtagtggagtctccactctgcacactctggatttatttcgtgatgttgcttttcatttggagaaggtctttgaaacaagcaagcagtgagatgttcttctagacatgtatgttgcaggctttggtgaaattcaacaggatgttttcccaagtcaaaggctattgttgttgggagacgcaggctggagaggatttccccagggtttgcaaaggcgagggaggcttggtgctggctccccaccgcgcgcggcacccctgagaatctggtcttcatcgagcgctctcaggcacggcatgtaagccgatccccgcacaaaactgtgcattaatgaaagttttgacaaagagatttcattttggagctcacgttccctgaagggtttgtaataattgtacttgaaatggagccattcggcctcaatgctttccagattgggggcgcgaggcatagcccatcccgggaaggtcggctggggagggggaggccgcaagaggtgccttggctggagttcgcggggatccctggcactggctgacctggggactgtgtgtccacagcctcgaccttctgcatcctcccagccatcacaaggtgggcgttaggactcttgatttaaagctgagcacagggctgggcacattggcccacatctatactcccagcactttgggaggccaaggtgggaggattacttgagcttgggagtttgagaccagcctgggcaacatgatgagatcctgtctctacaaaatatataaaaattagccatggccgggtgcggtggctcacacctgtaatcccagcactttgggaggccgaggtgggtggatcacctgaaggtcaggagttcgagaccagcctggccaacctggtgaaaccccgtctctactaaaaatacaaaaattggctgggcatggtggcgcatgcctgtaataccagctattctggaggctgaggcaggagaatcacttgaacctgggaggtggaggttacagtgagctgagattgcaccactacactccagcctgagtgacagagggaaactctgtctcaaaaataataataaaaataatattaaaaaataaaaataaaaaaattagccaggcatggttgcacatacctgtggtcctagctaatctggaggctgaggcaggaggatcacttgagctcagaaggtggaggctgcagtgagccatgttgttcacatcactgcactccaacctgggtgatagagggagtccctgccttaaaaaaaaaaaaaaaaacacctttgttatggtttcctgtgctccctttaaaatgtattcaggcacagtgggtaggggcagtgttctacccttacccttgagtggaaactggacattcccataaccatttgacagtcagttgaagtcataagctatgatgcatcaattagctgtcttgttctatggaataagcaaaactccaaacttggttcaggattgaacctgccccttctgcatttggggcctgctattgtggctgtttggagtaggctggggcatgcgtgccttctctgctattgcaacgtccccgcctctctcgccacccttcctagcctttccagggttgaagcggggattgccgggagggggggcaagttgagcaggacatctgtacttgctgtggtctctcctcctctctgggctacaaggctcatagctgcctttctctttggagggacacccctacccccatctcgatcccaaacacttggcaagtgcacttccttctggccgttgcttatggttttttcaacatccaggagtttggagaccacctcccaacttctcctctgctgatgtctgttcattacactggacaggaggtgatgccctggccagcttgctgtctgcatggcctgcatctgatctaaaataccggaccgggcgcggtgcctcatgtctgtaaacccagcacactggcaggccgaggcgggcagatcacctgaggtcaggagttcgagaccagcctggctagcatggtgaaaccccatacctaaaaaaaaccccacaaaaattagctgggcgtggtggtgggcacctgtagtcccagctacttgggaggctgaggcgggagaatcacttgaactccagaggctgaagctgcagtgagccgagatcgcgccattgcaccccagcctcggcaacagagcgagacgctgtctcaataaataaaaaaataaataaatagataaaaaaagaaaagtgccgtgattgtctaaatgaggttgttagaaatgcttaggaaccaccgggcggtggctcacgcctgtaatcccagcactttgagaggccaaggcgggcggatcacgaggtcaggagttcaagaccagcctggccaacacggtgaaaccctgtctctactaaaaatacaaaaaaagtttagccgggcatggtggtaggcgcctgtaatcccagctactagggaggctgaggcaggagaatcgcttgtactgggaaggcggaggttgcagtgagccaagatcgagccattgcacttcagcctgggctacagggcgagactccgtctcaaaaaaaaaaaaaaaagaaaagaaaagaaaagaaaaaaaaaaaaaaaagaaatgcttaggaacctgccagttggaataatcctgtggaatcagggagtaagtgggttgggggccacgagagtcattagctaggagacacgcacacatccccatgtcggccccaggcctcttccagctcccatggccactgtgttgggcctggggtacctaaatgcccccacagcagtggtggggcaaggccaggaggagctcagaggtgagactccttgaagatagccagtttcttcagctccaatatcttcccctgcttcttccatattcaccagacaccgcctccaggaagccttccctggtctgtccagatggaagccaggttcctccaggagctgcccctcttttcagcccttgtcactctctgcctgttgtttctgccccaggcctgtatcctttgcgctgtgtcacactccatttgagcaagatggccactgggttcatccccatggtgcccagcacagggctttgtccaaaggggtgctcagactcttggaggtgcatgctcatagaaagtatgtgtgtgtgagtgtgcgccatgggctgtgtgtgtacatgagctgtgtacaagcgtggactatgtgtgcaaacacaggttgtgtatacaaacagctgagtttgtgtgcgtgtgtgtgcatgcatgggccctgtgtatacatgggctgtgtgtgtgcatagtgagtacatgtacatgggctgcgtgtgcagctccaaaatcttccgccctttcttccggattcaccagacacctcctccaggaagcgttccctggtctttccagagatggaagccaggctccctagaaaaatctagttcaaaactatgcttgaaggccgggtgcggtggctgacgcctataatcccagcactttgggaggctggggcaggcagatcacctgagttgaagaccagcctggccaacaggacgaaaccttgtctctactaaaattacaaaaattatctgagcatggtgccacatgcctgtaatcccagctactcaggaggctgaggcgggggaatcacttgaatctgggaggcgaaagttgcagtgagccgagatcgcaccactgcactccagcctgggcgacagagcaagactcagtctcaaacaacaacaacaacaaacaacaacaacaacaaaaaccagctatgctcaagaaaaatacacacggaatatattgccccttccaaagcctttgaggtcatttggcccaatcccctcttgttctaatggggaaactgaggttccaagaagggattgggctttctatactaacaggtcccagactcagaaactcctgccaagctggaggctaaggcccctcagggactggcaggtgctgtggagaacacaggaccggggccggagttgggctggagctgggctggagccccactgtcaggggggacccaggaaaggggctgttccactgcagcctgggagggtggctggattgggagccccctcatctgacccagtgtgggtgggtggctcagcccatgggagtctcagctcacagggtctagggacgcatgcccccctcttgttgccatgctccccaagcggctgtccaatctcttcttgggcacttacaggaacgggcactccctccttcccggggctgcctggctctgtgctgaaagctcattctctaaggggcgggagctgctctacatggtgtccgcccagtgactttgggtcccaaggtggggcccatctgctgcctcctccttctcagggtgagctgcccagtccctctgtggctccccagggcccagcctgcctgctgcccccagaaccttctccagctcatctaccattgtgaagaatagagcctgggcctcatatacgcagttactcctgttacatgcctttgttgtgatttcttctctcatcagtgatgcaccttcctcccaggccccagaactgggtgttggggcaaggtctgtggggtcccctctcgcctctgttctctaacaatgcatggtgctggtgacaacaggacggtcaccacctcctggtttgtatgtctcagaaatgatggttggaaaatgaaatataaacagcacttctcaaactgtcccacgtgcaggagtcaccctggggggtcctatttaaatgcagattaggattgataggtctgggacagggcctgagtgtcgccctaccctgccctgccttgtcacccaggctggagttcagtggtgcgatcatcactcaattgcagcctcaaattcctgggctcaagggatcctccagcctcagcctcccaggtagctgagactacaggtgtacatcaccacacctggctaatgttcgtatttttttagaagcagggtcttgctatgttgtccaggctagtcttgacctcccggcctctggtgatcatcccgcctcagcctcccaaagtgctgggattacaggcgtgagccactgtgcccagctaagggtctgcatggctcacaaagccccagcacttgcggacagggggtctgaaccacacaagattgcctcaagggaaggtgctggaacttttgtttcagtcctgaagtcacaggcactggtcaggtttgtgagcagggaggtgacacctccaagggacatgagtagggagcaatggccattctcctccttggagagtcccttgttagaacctaggcctgccacttcctgtttcacagtagttcagtatttacagtaacttccaggaaggggaccatgtgtcacgcctgagctgaccctttctctctgctgcgagctcaggatgtgggcaggcgaccctgagcccagcagggccctccatctgcaggtgtcccccagctccccagtgtccctgagctcactaccccagctgagccccaacacctctttttttttctttggggacacagtcttactccatcacccaggctggagtgcagtggtgcaatctcggctcactgcaacctctgtctcctgggttcaagcgactctcctgtctcagcctcctgagcagctggaattacaggcgcgtgccaccacaccccactaatttttgtatttttagtagagacggggtttcaccattttggccaggctgctctcaaactcctgacctcaaatgatctgctcgcctcggcctcccaaactgctgggattacaggcatgagccacggtgcccggcccactggcaccacctctttgccccatgctgacccctctcatgttgggattagggaccagggccaacctcctcccctgtctatgctcgcctgattcggggacttccgcctcgctcctctccactccagaggcaccagggcttctgtctgagctgtgaccccaaagttgctgttgacaactgacatgtgtcccgggtcctgtgatttagaaaacatctcacctctgcctccgccatctcattggtccttctccagggcacccagaggctggcattgttatgaggatttatgtgaattttttacttccttgtcgtccacacgatgctgctgagttcagagcgattcagtgaattttccaccgtcaccggccatgaaaggccagagcctggactcttggttgttgcccagactgtgtgtgtgtgtgtgtgtatgtgtgtgtgtatgcctgtgtgtgtctgtgtccatttatgtgtgtgggctgggcacggtggctcacgcctgtaatcccaactttgggaggctgaggcgggcagatcccttgaggtcaggagttccagaccagcctgaccaatatggtgagaccccatctctactaaaaatacaaaaaattagccgggtatggtggcgaacgcctgtaatcccagctattccagaggctgagggaggaggatggcttgaaccagtgagcagagatggcgctattgcactcagcctgggtgaaaaaaaaaagttatgtgtgtggatgaatgcacgtgggtctgggtgtgcacgtgtgtagatccatgttgggtgggtgtgcccgtgtatgtgagcactctctgtgattgtgcagaagtgtgtatgtgtgttgtgtgtgtgcatgactgtgagtgtgcatgaatgtgtatgagtgtgttgtgtgtatgcatgagtgtgatgggtgtgtgggcactctgtgtgtgcatgggtgcatgtgtgtgcctaggtgtgtgcatgagtatgaccactccatgtgtgtgcatgactgtgaatttactttgtttttgtgtgtacatgagtatgtgtgtatacttttttttttggatggaaagaggagtttgttaaggagtattaactcacaggatcacgaggtcccacaataggccgtctgcaagctgaggagcaaggaagccagtccgagttccaaagctgaagaactggtagtccgatgttcgagggcaggaagcatccagcatgggagaaggatataggctggaagcctaggccagtctagtcttttcacattcttctgcgtgctttgtgttttggccacaccggcagctgattagatggtgcccacccagattgaggggggtggggtctgcctttcccagtccactgactcaaatgttaatctcctttggcaacaccctcacagacacacccaggatcaatactttgcatccttcaatccaatcaagttgacactcagtattaaccatcacagctgccttctcttataagacggggaaactgaggcccaacagcccagagatggacagacacttgcctaagatgacacagtggtattacagactagaccctgagtctcctggtccctcccagctcgttacaccttcgaggaccctaggacaggagaagccacactctaagctagaacccatcctcacaccacagcccttgaattctccttctgtcctttccctctgcccgaatggggtcagtggagggaatggactctgggtgaaatcacacccattcagagcctttgggacaaatatttgagagtcaccaattacctgatcatcaaagacatgcctttaacttcctgactgtcccggttgtttggggcggccaggaggccccctggaatccctactgtcactggcatattgcaagcacatgttttctgcacacagagctgctcacaataaaccaacgctgaaaagcacattaaaatgaatcggagaagagagagtcactttgtaacatgctttattttattttgtttttgccttggaaaggagcatgttttggctgccaatgaaagagctggtgggggcctcttagcagaaaccaaacgggtccagattagacctacccagcccaccccctgggacagtggctctggctccagggagctgagaggggccccgagaccaggggtgagctgcagggctggtctagaaactggagatcccgggtaccagccctgagctctgggacactggatcccttttctccttttacctagcctccgtgttcctaactgcagaagagattccctgactgtatttgctccttctgattagtcagtgggcaccacggtccctaaggagagtgcatttctcataacagctctgcaagatggtttggaccatccggggatttccagccagagtgctgttattttgcatggattggtcacaagctgagattcatacctttctgtccaatccctctccaacttccctcttaggtgtgctgtctgcagccttctcctccctgcacacatccaaaagcaactcctccccactccctagaaccactccttttttttttccccctcactctattgcccaggctggagtgtggtgatgtgatctcggctcaccgcaacctccgcctcccgggttcaagcgattctctggcctcagcctcccgagtagctgggactacaggtgtgtaccaccacgcctggctaattttcgtatttttagcagagacagagtttcaccacgttggccaggctggtctcaaacgcctggcctcaagtgatccgcctgcctcggcctcccaaagtactgggattacagatgtgagccaccgcgcccggctttgcctagaaccacttctaattctccttgctcagtgaaaaacactactccgtctagccaatctgccgttgaaatcagaaacctcaaagcctcaactctctccttgtgaccctgttgcaagggatccccaacatcccgtggattcttctgtctctacagccctctctaatccatctcctcttttctgcccctcctggctttgttttttgttgggtggggggagcaggagacagaatcttaccctgttgccctggctggagtgcagtggtgtgatcacagttcactgcaacctccacctccccgcctcaggtgatcctcccacttccccatcctgagtagctgggaccacaggcacacgccaccatgcctaatttttagtgtttgtaatagagatggggtttctccgtgttgctcaggctggtctccaactcccgggattaagtgatcctccctcctccacttcccaaaggttgggattactggcgtgagccaccacaaagtggcccattttcttaccttagatctcacccacctatcagaactgtctcagcaacctccggtctctccccaccaagagcaagcagaaatctaaacattccccttccctgtttgagacccttctggactttccaccccacctggatatcagccaaatagcaccgccgctggtccctgtggtttctttgtgcagattaaggaaaaagcgccccttcctcaaggcacgtgactgccatctgctggaaaactgccgtaatatatataaaattatgaggaccatgatatgatggcgccctctagggttgtgcaaacacagcatcctgaatcccacagcctcctggctttcaagagcctgatggccctccagcctcatgtcttccactccttgtgcctgctcacatcttctcttccactgatcacaagctgtttgaggctctccaaacacactggagcatggaggtggagaatgtggactttggagacagaatcccagctccgtcatgtaactgttacaaaattccttaacctggccaggcgcggtggcccatgcctataatccgaacagttttggaagcctaggagggaggattgcttgaggccaggagttcaagaccagcttgggcaacacagcgagaccccatctctacaaaaaatagaaaaatcatccaggcgtggtgcacacctgtagtcccagctcctcaggaggctgaggtgggaggatcgcttgagcccaggagtttgaggctgcagtgagtcatgatcacaccactgtactccagactgaacaacagagataaaaccctgtcaaaaaaaaaaaaaagatgatggtcttaacatttagggtggcatgaaccaacaaccctcccttcccacccctccttgataaacagatgaaacattggcccctctctcctaaagcatgcccgggcacagagaatcttatttacaggaaccctcagaggattctcccatcactcacgaaacctgaccgtaaggtctttcagctcagatgaaggaggagagacccctaatctttgctgggtgtcatttcacatgtggaagtggtcacttttcaaattcaggtctttaccttcccacctgtattagttcgttttgtgttgctataaaggaatacttgaggctgggtaatgtatacagaaaagaggtttgttccagctactcagccaggaggctgaggcgggaggatcctttgagcccaggaggtcgaagctgcagtgagctatgatcgtaccactgcactctagtctgagtgaggtttacttggctcacagttctgcaagcctggcaccagcatttgctcagcttctggtgaggcctcaggaagcgtttactagtggcagaaggtgaagggggagctgatgcgtcgcatagcaaaagagggagccagagatgggggaggaagaggtgccagctctttaagacaaccaggaggctgggcatggtggttcgtgtctgtaatcccagcactttgggaggccgaggtgggcggatgatttgaggtcaggagtttgagaccagcccggccaacatgatgaaacccacttctctactaaaaatacaaaagttaaccagacgtggtagcaggcgcctgtaatcccagctgctcaggaggctgaggcaggagaatagcttgaacctgggaggcgggggttgcagtaagctgagatcgtgccactgtactccagctcaggctacagactgagaccctgtctcaaaaaaaagaaaaaagaaaagaagaacagaaaacagcctctgattccctccctcctccttgcacctagagcaatggcatctcactaaggctggtaaactcactaatgggatgccagtctggccagggatcactggttcttgctgccagatgaagagtggggctgcagaggtacagggcagggttcattcccacccccagaatggtctaggcccggccaacacgggtgagttgaggcccccagcagctcagggtttggcttcctggcctctttcagcactgggggctcttttattttttttttgacggggcctcactctgtcacctaggctggagtgcagtggtgcgagcttggatcactgcaactcctgcctcccaggttcaagtgcttcttctgcctcagtctcctgagtagctgggactacaggtgtgcaccaccacgcacggctaatttttgtatttttagtagaaacggggtttcaccatgttggccaggctggtctcgaactcctgacctcaggtgatctgccaatctcagcctcccaaagtactgggattataggcataagccatcgcgcccagtcttttttttttttttaagagggtctcactctgtcacccaggctggagtgcagtggtgcaatcatggcttactgcagcctccaattcctggactcaagtgatcctcccacttcagcctcctgagtagctgggactacaggcaatcatcaccaagcccagataatttttgaaatttttttgtagagatgtagggatctcactatgttgccagggtggtctcaaactcctgggctcaagcaatcctcccatcttggctttccaaaatgctgggattacaggcgtgagccactgcacccggcctctcagaggagccttttaaagatgtaaatgagatcatgaaatcgccctccctgaaactcagtaattccgttcactgtgataaaagtcccctcctgggccctgcaggtaaggctgcacctcatcccatgtcacacacacctttgctcactacctgccagccttttccctgcctcagggcctttgcacctgctattcctgccttctgacacagctgcagagacagggcgagcctggggcttggggctgagtcaggctcactgcagcctcaaattcctgggctccagtgatcctcctacctcagcttcccatgtagctgggactacaggtgagcaccaccatgcccagctaattttttaattttttgtagagaatgaggctgggagggggtctcacgatgttgtccaggctggcctcaaactcttggcttcaagagagcctcctgctttggcctcccagaacattgggattacaggcgtgagccactgtgtctggctaatgggggcttctctgagcgagccacacaaggtgattcagagcacttgtgcatctcacttttttctttttctttctttcttttttttttttttttttttgagacggagtctcgctctgtcgcccaggctggagtgcagtggcacgatgtcggctcactgcaagctccacctcccaggttcacgcgattctcctgcctcagcctcccgagtagctgggactacaggcgcccaccaccatgcctggctaagttttttgtatttttagtagagacaggggtttcaccatgttagccaggatggtctcgatctcctagcctcatgatccacccgcctcggcctcccaaagtgctgggattacaggcgtgagccaccgcacccggcccatctcacttttttcaaaagtattcccatctgagttcaagtcgacatcaggtggtggcgcacgggcagaggccctctccctgcctcccttggcctggccacaccaaaccctttagaaggctttgacttgggaaagcataacccgctggactcggtttcagggctgggtctcctggatgctcaatgtgaatgctactaactgaactcccagaacaaatcctgattctcaagggcaaaagtggcctggctggtccaggggctgagcccttgtgggttccgttaagctatcctaagaaaaggcggctcagagccctgctctaggctgaaggcagacaggacctgctggtccctggccatggtagtcaccaagcgccacacgtggacaagaacgtttcaagtcccaggacataggattgtcccctgatctggccagtgtggctgatagtattcatgtgactacttgcaaccttacaaaaaggggcccatcagaagtgtttccccacaggccaacaaaagggaggaccccggttctgctgaagtccaattctgccaggactgtaggtgggaggattgcataagcacgggagtttgagaccagcctgggcaacatagtaagactccatctctacaaaaccccccaaaattagctgggcatggtggtgcacacctgtagtcccagctactcaggaggctgaggcgggagaattgcttgagcctacttaggagtttgaagctgcagtgagctatgatcacaccactgcactccagcctgggcaacagagtgagaccctgtctctaaaagtaataataataaataaaatgaaagacacaaccgaattcataaggcaggaatgtgctctaggtgccccagttaccagaagctaaggaagcagagggtttcgctgctggtgctgtggtcaccgtggaggtcggggtggagtgagaatattggtcttggtttacccctgagtcagcacaggggaggaggttgggctcctctgttgctgagttagggctatgacttagtgcaagaggcaactcaggaaagcccactggctcatggaggcaacaagaaaacttgtccatcttctgtgtactctggatggggaaaatttggctggaaaaaatcaaaacctagccaggtgtggtggctcacgcctgtaatcccagcactttgggaggccaaggtgggaggatcacttgagaccaggggttcgagatgagcttgggcaacatactgagagccctgtctctacaaaaaaataaaaaattagccagtgtgcggcatgtgcctgcctgtagtccaagctactagggaggctgaggcaggagggtcgcctgagtccaggaggttgaggctgcagtgagctatgatcgtgccactgcactccagcctgggcaatagagcaagaccctgtctcaaaaaaacagaaacaaaaccttggcctctacttcccacaaattggccctacctctgtgaccaccaaatattcagttggagctataaatgatttaggcacaaacccccaaataagatagctattcaaatccagcagtgcaccaaaaaagtaataggtccttaccatgtagttcttcagaaaatctgtttatgtaatccacctcattcacagattagaagataatagagtttgatgaacttcaacacctatgcatgatgaaaactcttgctaaactaggaaaagaaagaagcttcttggcacatagatcctggctgctgcactccccagaaagcattgcactagtgtgagacattaaaagcctccctttttacaattttattattattattattattattattttgagatgaagtctcgctctgtcgcccagactagagtgcaatggcatgattttggctcactgcaacctccgcctcctgggttcaagcaattctcctgtctcagcctctagagtagctgggattacaggcatgcgccaccacacccggctaatttttttgtatttttgtagagacagggtttcaccatgttggccaggctggtctcgaactcctgacctcaagtgatccaccctccttggccccccaaagtgctgggattacaggcataagccaccacgcccagcctctatttattttatttatttttatttttatttatttatttattctgagacagagtcgcccacgccactgagtgcagcagcgtgatcttggctcactgcaacctctgcctcctgtgttcaagtgattctcatgcctcagcctcctgagtagctgagactacaggcatgtgtcaccgtgcccagctaatttttgtatttttgtatttttgtatttttttagtagagatggggttttgccgtgttggccaggctggtctcaagctcttggcctcaagtgatccacctgtctcagcctcacaaagtgctgggattacaggtgtgagccaccatgcctggccagtagcctccctttaaggtcatgaatgggatttggaggtagttgtcacaacttctacccagcattgcctttcagatcctaacctgtgcaatatgtggagttaaaggaataaaaggcaaattggaaacatttttatgacaaaaggcagtgttaccacagcacaaacacatgctacagattgggaggagatattcgcaaagcatgaaattgacgacgggctggtattggaaatacggcagaaagaactcctatgcatcaaaatgaaaaagacagaacaacctaataggaaaacgggtcaagggcatgaatgggtatttcccagagtggggaaacagaaatggctcaaaaacctgtgaaaagatgtccagtctcattaacaatgtagaaaatgcaaatttaaaccacaacaaggctcggcacggtggctcactcctgtaatcccagcactttgggaggccggggtgggtggatcatttgaggtcaggagttcaagaccagcctggccaatatggtgaaaccctgtccctactaaaaacacaaaaaaattagccgggcgtggtggcgggtgcctgtagtcccagctactcgggaagttgaggcaggagaattgcttgaacccaggaggcagaggctgcagtgggccaagatcacgccactgcactccagcctgggtgacagagtgagaccctgtctcaaaaaaataaaaataaaaataaaaacaataaaaaaaataaaccacaacgagattctgtttcacacccaccagattggcagagctgctgaggttttggacagctgcctctctgggccctggggtctggaggaggaggggtgttggatgagtcaggggacccagggttgtccccaacaaccctattagggaggtttattccttccagctggggctggccggagagcaggggacagtgagctatggctagcgaggcagtgctgtttgggtcttaccccaggctctgggggtgggtggggctgatccactgatgtcaggacccccctccaagacagctagatgtgtctttggctgcagcgcctgggcccagcctgcagaactggcgggcaggagagaaggagaaaggggatgtggggtaaccgggcaaggctgcccttcccttgtacttggacagtctcctcctcgcagagaatctgcatctccagctacccatccgccaccaccatatccctaaagctcagagaggctgaagtggggagatctaggctcccttcccggctcctcccatgctccagcccagctgtgagcagagagcaggcatcagacactgaggccagcctctggttgtcccaagttctttcaatggctttgcttctggcctgaacatcctcccatctgcaccttcgtgagtccagctgggctcccagaagcctgggataagaccagtgtggacgccagccctgcccacggggcaggagctttcctggttgctccagaccagtgtctgggtgccgataaacaaggcagacaagagccccaatttagtagcctcactctgtgcctgaacagagtcttctgtctccttcttggaacctgcacacaaacggtgcctctctgatcaaggagaaattggtgtttctggattcgagaccctctcttactataaatatttattttttttttgagacagggtctcaacagagactctgttgcccaggctggagtgcagtggcgcgatcggctcgctgcaacctacaacttctggttcaagtgattctcctgcctcagcctcctgaatagctaggactacaggtgtgtgccaccacactcagctaatttttgtatttttagtagagacagggttttgccatgttggccaggctggtctggaactgctggcttcaagtgatctgcccgccttggtctcccaaagtgctgggattacaggcatgagccaccatgtctggctcttttttttttttctttttttgagacagagtctctttctgtcacccaggctagagtgcagtgggttgatccctcggcttgctgcaagctttgcctccctggctcaagtgattctcatgcctcagcctcccaagtagctgggattacaggtgtgtgccaccacaaccaggtaatttttgtattattggtagagacaaggttttgctaggttgcccaggctggtcttgaacttctggcctccagtgatctgcccacttcagcctcccaaagtgctgggattacaggcatgagctgctgcacccggccagaccctctcttaccttttctgggcttggccatctctctcccgtccttcactgtggggacagaactacctctcaggcatctggaaggcgagggggatgctttgtaacgcatcgtgccccctgtggaactgaggattaattcttactttggtgtaaataactgagggggaagtaaggagttgctgccctgggagggtgaacctggttttagccctgggttggccaccattcaaatgtgtgattgtggccgtgagccacttaacatccagatatcttttctaatctgtacgaagaaagggctgagtgagatcattctaagatccttcttgtctttacaactgtatgggagatttgcttttttgttgttttttgttttgttttgttttgtttttttagagagagaaagagagttttgctctgttgcccagactggagtgcagtggcaatagtcatagctcactgcagccttgacctccttagctcaagcaatcctcccacctcagcctctcgaatagccgggactacaggtgcgcaccaccatgcatggctagttttaattttttttttagagatggggtctcactaggttgccccacctagtctcaaactcctgggctcaagtgatcctccggcctcagctcccaaagtgctgtgattataggcataagctagtgcacctggtgagatttgctttttaatataagagtacaaattacagctgtcttttctcagccatgcagtctagtcccacattctctaaccagttcaggggcccaggagacggctttgatcattcgtgtcttaagggccaaacaactgaggttcagagagccgaaaaactttctcagggtcacacagcgtgtcgggggcagggcccagagagatgactaggccttaagctattaggcaaccactgtaaaatcctgcacagaggccgtcatgttgttcgaaggcattttaaagaactattcggggcagcaatacacagaaagtctccctaagaaagagccagatcgtgtttgggtgatttcccaggctggaaaatccaggcaagtggaagaaaaaattcatccttggtgaaggtcggtgcctggtaaggggaggggccttgtcgagtgctcctcggattaccatggcaactgcctcctgccaggaaaggtgtgatcctgagtctgaccctgagactcaaggagtctccttcacttgccccgtgattcttcccttcctgtctccttcacccatcccatctcccgcctgagctgacatcactgccctagggaagctgagcccaggctgccaaatgccaccaagcaggtagcttccgtgtgagcgcagtattccccagagatgtggatggatctccttcacctgttcctccgttgggtgtctaggaacctgggcaatggggctctgacacctgcctgcccatctgtattggtccgttttcacgttgctgataaagacatacccaagattgggcaatttacagaaaaaaagaggtttaatggacttacagctccacgtggctgggggagcctcacaatcactgcgaggtgacttgctcctccttgccttccgccatgattgtgagacttccccagccacgagagagcttgtgctgggtgcagggaaactcccacttatataatcatcagatctcgcgagacttactcactatcacgagaacggcatgagaaagacctgccccatgattcaattagctcccactgggtccctcccacaacatgtgggaattcaagatgagatttgggtgaggacacagccaaaccatttcaccatctcttgcccatcttgatcccaggggatagaagatagctgggctggaagacagggttggggtgctccagggcttcccccactgcagtcagagaagcttcccttctccccgcatttttttttttttttttttttttttttttttttgagatgaggtcttgctctgtgtcccaggctggagtgcagtggtgcaatcatagctcactacagcttcgaactcctggactcaagcgatcctcccacctcggcctcccgagtagctgggactacaggcatgcaccacccaggcctagcttgttctaaaaaactttgagagacgatgtcttgctaagttgcttaggctagtcttgaacttcttggctcaagagattctcccacctctacctcccaaagtactgggattacaggtgtgagccactgcacccagcctgtcttttgtttttaaaactctgctgccatttctctctgaaagccccaatggccagagaaccttgcccgcatcttgctgtatttttgggaatttgtctgttccttgagaggcgattgcctcctcctgagccttgaccagtgggtgctacaggaagatgaggcctcacctagtcccaaggctgtgggtgcccctcagccctctggggttcagagtgcctggcagtgtcaggccgctccccaccccaccacagcctggaggctccaaggctgccagctttgtttcatgaccctttgaaccttgaccttgggcttggagcaccattaagacaaattctttcccagtgatgaagagcaatggcagcgccaactccccgtgtccaagtgggtcaggaaccacagagtccgtctccccctgcacttggtgtcatctttcaggcccaggcggggccagctgccagctttgcggggccctggagttatttatgatttctttctggatgaggaagaaagggttagagcacttgaagcaataacttcagatgaacaatgcgatcctcagaaatccacccaagagaagcaattgaatcgctgaaaccggcaagataaacatgtacagtgatgttcccctctcctggtatccttgctgccccaaacaactgctgggactgatcacttatttttgttgcaatgaaatccccgtcaagtcctgagggacattcctggaagacttgaaatctctccaccgagcacattgtaacccagcttccttcatccaagcatccccagctgtggggaccccaatctgtccccaacggagggccaagaagtacttgatcctgaaagagtctcgtccctctatactcacaccttcattctggggacatctcccattcatggctggtctgaaggaaagctggtctatggaacagtgttgctgataaattaatatattaatttaatcaaacagacctgccatgacctgttacacttgcctgtccagaagaggcgagctaaactcatctccaggtaatctgtctggcaggtgacacaggtacagatatggccccaggaggtgtcaggatctgggcactaatgctcatgcacctttttgggagctctcccggatgttacagttctaactcactgactcctgaggtttccaaagtggcccaaagcaatcaggagccacaaattctttttttagtttttcccctagagacagggtctcgctctgtggcccaggctggagtgcagtagtgtcatcatagctcactgctgcctccaacttctgggctcaagcgatcattccacctcagcctctccaacaaaaggaaccaaagtgagcattaggaggctgcagagggagaggctgccgggccctgctggtggctccctgccactctgcacaggctgctgaggccaggggacaggcttcctgctctatgcatgtgcaccttctgagatcccactcagccactgccagctgggggacactgaacagggagcggggtcaggcactgggaactgccctgtgcatcctcaggcagagcacagccctctctgtgcctcagccacccatagatcagaggcagggaccacctggacactcttttaaagcccgttcaacctcgtcattctgagtcagtaactaacggagctagaagtcacgtcatctgggcgtccagtgttccctcctctctcctcgggaaaaggagctgagttttgcttgctgagagcagatggatcacatcaccgcggctcattctcaagcttccatggtgaaatgtgatcccctgtgaagcatcccaggccctccagtccaggcagggctacaggatgagcagccagatgccctggttccatttcagctcatctgctccctctcagtggccctcagttttcctccacaataaaatggggcaataatcccctggtctattgcctggtccagatctttaccctcagcctgcagggagtgtccttatctttagtcccagctgtttatccagggaggatgtgcaggaagggacaagctctctgtgtgcatgctgagtagagaccaccattgctacatccagaagtccccccggagcatcataagctgaagatggggtctgaaggtctcagggtacgctcttgagtcaagcccacccaacacctgcctggggcaggcagggcagctcagctagagacggtgcagaacacagggtccttggggaccctcccagcctcctgatagcagagccttttatagccaaatcattttggagagagactcatttaagaactggccaggtgcaatggctcatacctgtaatccctacactttgagaggccgaggtgggagaattgcttgcggccaggagacgcgaccaccctgggcaacatactgagacttcgtctgtacaaaaaaatttttaaaaattagctgggcatggtggtgcacacctgtactcccagctactcaggaggcaaaggtgggaggaagagaaccaggttgacagacaagcacagacacatacacacacacacacacacacacacacacacccccgtgttcttgcatgtttttgctccagcagggggacatgtggagtggtcttccttttgctcccctctcatgctccttccccagcagcagggccctgactctctctataagcccctttatgttttttctggacttagtggaaatgggaaacagctgctgggggctgcagggagaagcagttcccatgcacagtaaggaagcctcaccagatggctgatcttgatcttggacttcccagcccccagagctgtgaggaaataaacttctgttctttataaattacccagtgtattagcctgtcttcacactgctataaagatactacctcagactgggtaattgacgaagaaaagaggcccaactgactcacaactctacatggctggggaggcctcaggaaacttacaatcatggtggaaggcaaaggggaagcaaggcgtgtcttcacaaggcagcaggagagagaatgtgtgcagggggaactgccactttttaaaccatcagatctcataagaactccttcactatcacaaaaacagcacggggagaccacccccatgatccagtcacctcccaccgtgtccctcccttgatacatggggattacaattcgagatgagatttgggtggggacacagagccaaaccatattaccctatctcaggtatttggttctcataatgcaaaatagactgagacaggtggatatacaaaaagtgatcccatccagggtgctaaattctgtaagccagttgtgtacagggtgcatggcaattggtgggaaggtgggtgcctaagtgcccttggggtggtcaaggaaggcttcctgaaagaggtggtgctagctgaccaatgcaggtgtgagggagggttgggagccatttctagatgagagtacaagactggtaaaggcttaggagagcaagaggtgcacagagcatggcaagtaggccacagcagcagcacatagggtgacaaggttggattggcatttgaggacaattaagagaacactttggcatgtttattacaaactgatcatgcctgtgtaaccagcacccacattaacaaagaacgttctcatgatcttgaaagccctcttcttgcctctttcaactgtgactctccccacgggtaaccactcacctgaattccaacaccttagactcttccgcttgtttctgaacttcagataaatggaatcagacagtaggtacttgtttgagtctgtccgccttcacctgacgtgttctgtgagactcgtccacactgttgcatgtggtttgcctactgttctgaccgtgttgcatttcattttgtgatatgcaatttatttatccagttggccattaataggaatttgggctgtttctaattttgggttattctgagcaatgctgccatgaacgttcttgtgcatgcctttcagtgaacatatttattcattttgtgaatgaatttcgtgcctgtcttgttctctcatctagaagtggctcccaaccctccctcacacccgcattggtcagctggctcctaattaagcaccacctcctccaggaagccttccttgaccactccaagggaacttaggcacccaccttctcgccaattgccttgcacctgtgcccaactggcttacagcacttagccctctggatgggataacttttcgtatatccatctgtctcagtctgttttgtgctactagaacaaaatattggacactgggtaatttataaggaacagaagtttatttcctcacagctctgggggctgagaagtctaagatcaaaatcaggcatctggtgaggcttcctcaccatgtttgggaacagcttctcctgcagcccccagcaactatttcccatttccactaagtctagaaaaagcagagaggggcttccactggagtaacagggacttaagacagagatcaggaagatgtttgatgctgaagtttattatatcctggcttgtattttcatgggaagggaggagatatctgggaatggagttgttgtgtcatagagcgggcttatattcagccttattagagactgccaaaggggttttaaaagtggttgtaccattgatactcccacccgcagtgtatgacagacagttccagttgctccgcatcctctctaatacttggttaaaaaaaaaaaaaagagtaactgttagtctttttaatatcagccattctagtggctatgtgggagtatcacattgtggtttaatttacatttccctgatatggcaaatgaacttgaccccctcttcatatgatcattggccatttggagctcttattttgtgcatacacatattccaagaatcctcttccagttggtgatatacttcttcattcattctcttaatggtgtcttttgatgaaaagaaattctttttttttttttttgaggtggagttttgctcttgttgcccagtctggagtgcaatggcacgatctcggctcaccacaacctccgcctcccgggttcaagccattctcctgcctcagtctcccgagtagctgggattacaggcatgcgccaccatgcctggctaattttgtatttttagtagagatgaggtttcactatgttggccaggctggtctcaaactcctgacctcaaataatccacctgcctcagcctcccaaagtgctggaattacaggcgtgagccaccacacctggcccgagaaattcttaattttaatgtggtctactttatcaatttttttaaatggtaatgcttcttgcatcctgcttaagaactctattttgaggtcatataggtagtcacctatgttttcttccaaatgctgtatttttttaccctttatgtttagatctacaatccaactggaattgacttttgcacgtggtatggattaggagtcagattcttttacttttctttttcatttgtatatccaattgaccagcaccatttattgatatgtctatcctttgtcttctatactgcatttgcgcctttttcataagccaagtgatgtgtaagtgtggatctatttgtctaactttgtaccatccatctgtctcgtgtcttaattactatagttttgtaacaaggtctcaattctagtagtataaatcttttacttttgttcttcttcaagactgccttgactagtcttggacatttgtattttcatatacattttggaatcaatcggacaatttccaccaaaaaaaaaagtctactgggattttgactgggattgcattgactctatagatcaactggaagaatttatatatatttatttatttattttcaaaaacaacaattgtggccaggcacagtggctcatacctgtaatcccagcactttgggaggctcaagtgggcggatcactttaggtcaggagttcgagaccagcatgaccaacatggtgaaaccctgtctctactaaaaatacaaaaaattagccgggcatggtggtgggtggctgtaatctcagctactcgtgaggctgaggcactagagttgcttgaacccaggaggcagaggttgcagtgagctaagatggcatcactgcactccagcctgggtgacagagtgagactctgtctcaaagaaaaaaaaaaaaacgactattgcagtgacatcgatgattaatcacctgtactccccctactgctaagggaaaaaccttctatacagttgagttacaaaggaaaatcaagacaatttatcaggcacctacagccagaaaatgctctgttgtttccagaggtatagacctgacatgtttgatgtcccagcgtaacacaccaacccagtggtatagacactgacatgttcaatgtactagtgtaacacaccagctgcaatttttactgggatggggagaattaacatctttataatattgagtcttccaatccatgaacatagtatatctttccatttatttagttatttaatttctctcagtggtgttttatagttttcaggagatttagtcctatgtaatttcatactttatgatgcttttgtacatggtatcacttaatttctttttctatttgcttgtcgtaggtaggaatatgattgatttttgtaaactgtctttatattccagccaccttgctaaactagcttaataattctataacagtagtttttcattagatcttgctggggggaagatgctttggcctgtggtccagccatggtgcaagacccatcaaccttgaataagggttggatgtggaggcagagagggagaaaaacagactctgccagccaagtcaacagaacccccagggttatagacagactttgtccatgcccagtcatggtccaggcacttgctttcatatcattgagaatgggtgccccagagaagaatcttatgaatcttatgatttgtgagtgtgtggcatggcctttgatgccagctttctaagagccaggtggagcaagagtgctgagatagttcccactcagtatccatagtttgacttcattcttttttttttttttttttttttttttttgagacagagtcttgctctgtcacccaggctggaatgcagtggcgtgatctcagctctctacaacctctgtctcctgggttcaagccattctcctgcctcagcctcttgagtagctgggactacaggcgtgtgccgccatgcccagctaattttttgtatttttaatagaaacggggtttcactgtgttagccaggatggtcttgatctcctgaagtcgtgatctgccctcctcagcctcccaaagtgctgagattacaggtgtgagccactgagcctggcctctgacttcactgtttttttggttttttttttttgagatggagtctctctctgtcacccaggctggagtgcagtggcatgatcttggctcactgcaagctccgcctcccgggttcaagcaattctcctgcctcagcctcctgagtagctgggactacaggtgcccaccatcacgcccggctaattttttgtatttttagtagagacggggtttcactgtgttagccaggatggtctcgatctcctgacctcgtgatccgcccaccttggcctcccaaagtgctgggattacaggtgtgagccactgcacctggcacttcattcttacttaagttagaaagtgaccaaacgtagagactttcttcctttgacccccctcctacatggcagtccagcctttacactgacaccccaatgctaccctgctggctcacctctcaatgggattttgataatggggatccagccagtctccttggggacagccacagtgggccatgctgccctcctattggccatggtatctttttagctggagcagaactgcgttttctttttcttttcttttcctttttcttttttttttgagacagagtttcgctcttgttgcccaggctggagtgcaatggcgtgatctcggctcactgcaacctccgcctcctgggttcaagcgattctcctgcttcagcctcccgagtagttgggattacaggtgcccgccaccacatccagctaatttttgtatttttagtagagacggggtctctccatgttggccaggctggtcttgacctctcaacctcagatgatccacccacctcaactgcccaaagtgctgggattataagcataagccactgctcccagccttctggatggatttttaaggatcgcctccagctgggccctggttggggtggcctgctggtggcacttgccctgcacatgccctctgcctgcagacccctctgagacctctcacagagggagctgggcctctggggacaggaccatccatgtgccttgcctcccactgggatcttgtggctcaagtagactccagctgcctctttccatttccctgcaataaccaactcctgccctatctgcaaatcccctctcagggcccaggccttgggaatccagcctcatttgggaggtgggtcctgaattctgggagcagagccatcaccaggagcagtgctgaccaaaggcagatggcaggtggacttgacaactgttgtcctgctgtgggtgggcagagcccggaagtgagaggccgaggaggaggtcaccggtggcaagagtgaagagtcctggagcctgaagccactggagctgatccagtgtaaaccccctttatagatgggaaaactgaggtgtggagagagagagggcgtctcaagccacacggtgagttcctggccaacttagacccaggtctctatagttctctttacaatgaacacaccgcacaatcaactctctctctcttttgagacagcgtctcaaaaggacactacatctccagcccaggctggagtgcagtggcacaatgacaactcactgcagcctccacctcccaggctcaagcaatcctcccacctcagcctcctgagtagctaggattacaggcacacgccaccatatctagctaattttaaaattttttctagagacggggtcctgccatgttgccccgactggtctccaactcctgggcccaagcgatcctcccaccttgacctcccaaagggctgggatgacacgcatgagccaccccacctggcctgctctctctctctatgtctctgtctgtctctttctcttttctttttcttttttctttttatttttttctctttttgagatggagtctagctctgttgccagactggagtgcagtggcacgatctcggctcactgaaacctctgcctcccaggttcaagcaattctcctgcctcagcctcccgagtagcttggattacaggcacgcaccaccacgtccagctgatttttttttttttgtatttttagtagcgacggggtttcaccatgttggccaggatggtcttgatctcttaacctcgtgatccgcccacctcagcctcccaaagtgcttggattacaggcgtgagccaccacgccagcctgtgtctttcacacacacacttgcttgtgcacccacaaacacagactagtttgcctggtacgttgacacttccaacatacacctattggcaaaggtttaccccgctggtttctgtgtgggtcctagacgctgggaaaggcactgtggccccaggtgctccagggccagtgtgttctcggaggggccaggcatttgggacacttcataatcctggaaagttagcgaccacatcgtagagtagttcgggcagggcctcctctggtcacagagccaggagggggcaggatcagcacccccatcaccatttccatgtttccagcactccagtgaataatcaaagaaagttaaacaaacatgctttaattgcctgtcgatgacagatgccaagggaatgaaaatcccgtccggttctggagcgcctgcccggggatgggggtggtgtggggagtccgagctggctgggcctctagggcctcaccacagctggggagctggacccaccccacaacccccatgtccaccgttggccaagctgctcctcacctgccaagcagggtgcccagtgccagagcaaactgggcccaggcccagcataatttccagaaataggtctttgagagagctgggcctccccctccatccgctgaacttccaccatgcaggggatcctatttgttgcctcaggcccttgaaacactctgctcaaggcccctaaaagcctccagattgtgcagtttgcccagagttcctggacaggccagggctgtcatttgtaacttccccatgtccacctcctcctcctcttccctcaggccccaagggtggggtggtgtcttcctgtgtggctcgagctggagagttgcttttcccttccctccccttccctctcctcccctcctctcccctcctgtcctctcccttcccctcccctctctgacagggtctggctctgttgcccaaactgtagtgcagtggcgccaacatggctcactgcagcctcaaccttctggactcaggtgatcctcctgcctcagcctccaaagtagctgagactactggcacgcaccaccatgcctggctaacttttgtatctttttgtacagacagggtctcactgtgttcaccaggctgatctcaaactcccgggctcaagcgatccacccacctcaacctcccaaagtacagggattccagccatgagccaccacacccatccttcttttcttttttaaatatgttattttattttaaggctaggtgctgtggctcacgcctgtcatctcagctctttgggaggccaagccgggtggatcacttgaggtcaggagttcgagaccagcctggccaacacagcgaaaccctatctctactaaaaatacaaaaattagccaggcacggtggcacgtgactgtagtcccagctacttgggaggctgaggcaggagaatcacttgaaccccggtggcaaaggttacagtgagccaagattgtaccactgcacttcagcccaggcaacagagcaagattctgtgtcaaaagaaaattattttatgttagattcagggggttatatgtgcttgtttgttacatgcataatagtagggattgggcttgtagtgcacccatcacccaaatattttttgttttttgtttttgaaacggagttttgctctcttggccaggctggagtgcgatggcttgatcttggctcactgcagcctctgcctcccgggttcaagcgatcctcgtgcctcagcctccctagtagctgggattttaggcatctgccaccacacctggctaatatttgtatttttagtagagacagggtttcaccatgttggccaggctggtctcgaactcctgatcctctcacctcggcctcccaaagtgctgagattacaggcgtgagccaccatgcccggcctcatcacccaaatgttgaacactgtaccagagagattatttttcaatcctcataccccatctttatgtccatatataccccttgttcagctcctacttataggtgagaacatgcaatatttgatcttctgcttctgagtttgttcgctcagaatgacaacctccagctgcgtccatgttgctgcaaaggacatgattttattctttttcatggctgtgtaatattctacagtgtatatgcacctcattttctttatccaatccaccattggtggacgcttaggttccatcttgctttttccaagtgatcctggtcaacccacagaacacagctactagagaggggtcatgcatctctgctttcaagtagacaacccctgaaggcaggcattcgggtctgtgcagccctgaccctctccccaccagtattagagtgttggcacagtgtcatccagtcgcaggaacatccacagagccttcgggtggatgagggatgattagaggtagaggagaggaggtggacagatggggagcagggtgaatgtataggtgggtagatgggggtgtttagggctggggtagcttaaggtgtaggatgggtagctgggtgggtgagtgaataggtgaacaaatggaaccctgttcattttgatctctgcctttcccattaaggacttctttcagccgcacaggaatcattggttgtgtaagtttaagaggaaggcactaggctgggcgtggtggctctcacttgtaatcccagcactttgggaggctgaggtgggcggatcccttgaggtcagaagttcgagaccagcctgggcaacatggtaaaaccccgtctctactaaaaatacacaactagccgggcgtggtgatgcgtgcctgtaatcctagctacccgggaggctgaggcaggagaatcacttgaacttgaggcggaggttgcagtgagcaagattgcatcactgtactccagcctgggtgacaagagtgagactctgtctttaaaaaaaaaaaaaaaaaaaaaaaaagcaggcactgaaagccccctggacgccagggccttgttgactggggacttcctggaggctggcctttcagggactccaccgtttcatcagggatgttcccaaatgtcagcgtcggtgggtctttcctctttggcaggcccctgtttccagggaggactccctcctctgccccatctggggcattttgagccccaggagagccagtggctcccagtctccatccccgccttgggtttgcaaggctggctggtgcacctggctgcatgcaccttgcaaaatagtatttgcattgttcatctgccaagaggtccctccgcctttccctttgctttgtggattttataccttttttatttcttgtttttttttgttttttgtttttttgtttttttgttttgagaagaagtctcactctgtcacccaggctggagtgcagtggtgcgatctcggctcactgcaagctctgcctcctggcttcatgccagtctcctgcctcagcctcccgagtagctgagactacaggcgcccgccaccatgcctggctaattttttgtattttttagtagagacggggtttcaccatgttagccaggattgtctcgatctcctgacctcatgatcctcccgccttggcctcccaaagtgctgggattataggcgtgagccaccacacccggcctacctttttatttctttatcagccctttcctgagaggaaacagaagggaacctgtgttcaatccaccatgtttaactagaaaaccacatccctgtatcatgtgtctttggtgaagtcctgcctggtcccagagtcagaaaactgtatatattcctctagttgtttgaatgttcagtgtttatacctcagtcttcaatctgttttatgcatcagaggtactgacaaggttttatggaggagaaagagttctattccttaacaaatgcttataaatcactgatttgggccagccaggggtagaagggagggaaggagggagaggggccctctgctaggccacatgtcactgaggagcagcgagtagggtgttgccccctcttgacccgagactgagcaccctgagggtacagcctcgaccacctattcccagggtcctgagactccccccaactccccgtggtttctccccaaacatctattgcagaggaatcgccctttgttttttgtttttttttttaaggacagggaacatttcaaggtgatttgcgttcgatgacaaagacggggatagctccaagaacaagggggaggctgacagtgtcggggggccgtggactgtgcgtgtgggctgcagttctcacctctcccaagcaggatcgtggtcagccccagcacgcagagtgggagctattcagttacccaaatacctcttaggcatctgtttaacagtgatggggatgtgcagggtcaggctttgaaatgagctgaagaaagagactttaggcatcccctgacttctagagcaataaaagctctttagaacagctttgaaccatctatttcatcattaaagagctccaggtctcgggcctcgggggagacagacataaaaaggtaattacagcccagagagatgtgctcttgggcggggtcagcatcacaaggctcctaattggccttccgggctccagtccctcccacttccatccactgcacactctgctgccagagtgagcatctacaaatgcaaacttgacctcgaatttcacccgcctaagaccctccagtgacctacagacactgccacagcccttcccaggcccctggtgttagagatccttgacctttccagccttggcagtcctcaagtgtgttctgagttggccaacctgccctgttctcactcccctcccagcctcagaaaatgtactctttcagaatgcattcctttttcttttagaatgcatttgctcttctctctgctgaacctggccagctattgtgcatttctcaggtctcatctttgatgccactgcctccaggacgtcctccttgattgtccccctgattggactggctttggcatccccttcctaccctgtgtctattagcccaactccttccccagactctggttctcaaagtcaggggcccacctcactatctgttcatcaattgtcagatattttttgagtctctgctttgtgccagtcactgagattcatgggtgaacacaatagaaaaagacccctgccttcattgtgctcaccagctcatggcatcaccttgtctgaataaacagacagtatagtgtactgcgcgtgctcagaagggaggctcagtggtccagcaggctgcatggaggagggggctctgagggtaaggctttgaaggatgaataggagttttccaggcaaaatgactggagatttctctgcttgcctgcctgcccagaggctatcctggtgactgggctgctgtcttcctagggtctacactctgctctcatataagttcctcttctctttcagaatgcatgaactgcacccggctcagtgacatgagtgagcgactgaccacactggaggccaaggtcagtcgggctggggagtctgggcctggggagctgcctggggaccttgggtggtggagggaggcatcaggcaaccactgggtgtggccgtggaattcccagccccgggtttccaagcaggcttggacagccggtcccaggtactgggtactgttcaggccttggtggctctgggtggccttcttgggctgggaggtcccgggcagcaggctggttttgggcaggtcagaatggtgctgagctcccaggacccgggggctgggaggctggacacccagaagacagtggaaagaggagggagtctctgtccctccagggccactgttcccacctccagaatggggctgggcacagaggaaccgatgggaaaagactccgtggaggaggaactgctgggaagtgaccagcttttggcccagtctataagaacaggactccctaagtggagtcaacccagaggcagaaggaatccacaaaggacaagtaatttacctggcagtgaccccaggcagcactgggcagggagagaggccaagaagggtatgcccagtacaggtgtgttcatgggcaggtgacctgtgggagcacctggggctccatcccacgctccctctgggagacggtggttttgagaacgtttcaggggcagccaccttagggcgatgaagccaggcatctctcctgctcctcactgggtaacacttacccgagggtacctctgtctcagcaggctcatgccagctcctgtggctggagaaagcccttggcagagttgcaggtggccacaggcaaaagccaaagccaggtggggctgaagggtgcgtgtggggcgccaacagtgtctgccccgatggggacaagccccgttctcacccagagggcttggtaagcaggctctggtgtttagccagaggggctcgacctgagggaggacaggtctggagggatgaggcagcctccaaatatctacaaagcctcttgggacagcagggttggctgcactgcctggccccccaggggagagccagcaccaggaggctggaatcacctgagcctgaggcagagctctctccggggaagaactgtggtgaccagagcacgtggcattgtccagagagagtgtgtgaacagggccacgtggcagggaggaccagggacctgagacggtggggctggagccccaggcagcaagaacccctagaagagagcagggccagggtcagccatgcctccacccagaagagcacacatacacacgcatgcatacccacataatacatgtgcacacacatgcacacataggcacctgtgcacacacatctgtgtgcatgtggagacacacatacatatatacacatacagacacacacatttgcacatgtgcacacagacacatgcacacacacaaaaacagggacacacatatgtaatacccatggtcacatgcacggatactcaggcatacatacacacacacacaagcatgcatgtcaatgggcacacatacatatacacacacacacacacacacacatgacacaactgtgcacacattaacacacacagcccttgacaactccacattacccttggccctgacttccgccctgggggttgcaggtgagtgtggcttggagtcagacatttgtgggaccaccacccgccagctgggtgactctctcagagcccccttcctcatctgtagaatggatcagagcatcagccctgcagggctgttgagagcctccagggagatggcagtgggaaccggctttggaaatggtctaatgctgaccaggagtcaaggattagtgctgtcacccacgccagccacgtcactgttcccgccttacagatatgaacacaggtgtgcgggagacatctgtgcagagcaatgacggggagccccacggcatgcattcgcggcttcccttgtcctccagcccttccatgggcgggcagggtctcccagcagcccaggcccctgggcacaggcctgggatgggagagacccagctgctctccttggagtcttagctcttgtggggcaggattggagggctccagggagcaaatgtttccacatgggctgagccggggccaggaccccctagaatgagtataggggaagatgttgagccggtaagcttctggcacctgagattttagaaaaggcagggtccccgagccatgcccagcctgatggacattttcctagtaccggaagcctctgtgtggtttggcacagagcagcagccctggcctcagcccagtattgtgggtgttaaaagtcgcagctctagggtaggatggccacattgccagctgtcccccacccacctggcccacatcctcccatcatgagcaattcctccctgtggtcttcccggccctgacaccctctccaccaagggccccagctccatggcctccagcagcaggcccggggcagagctttgtcctgtgaccctgagtgagaggactgtgtcctctctgtgtgcctcgagggctggagggagggacagcagtgcgtgggaggagcccaggccaagattcccacccttcctccactccatcttggccagcccttccctctggatctcagtcggatggcctggaaaatggaaattggagtcacttcgttttgaggctggtccagagtggggaagctcaggcagctctcgagtggggagctggggttggtagcttgggcctggagtgtgcagagatggggtagctctgcagcccccgtccttttgacagttgtctgcatttctaagtaggggctgggagactcctatcttagctcccccgtcttgtctggagcaccttctggccgcccacctgcccactccatgcccacgtatgttgagagggcctctaggaggtttttttagacaaggtctcgtgctatctcagtgtggtggcgtgatctcagctcactgcaacctctgcctcctgggacaggttcaagtgattctcccgcctcagcctcctgagtagttgggattacaggtgtgatccaccacatccggctaatttttgtatttttagtagagacggggtttccctatgttggccaggctggtctcaaactcctgacctcaagtgatctgctcgccttggcctcccagtgttgggactacaggcatgagccactgtgcctggccccactggcagctttgatggcccagatcagagggccctgagaggcagcggcctggagaggggaagggaacaccagctgggctagttgccaagacagcccagcggcaccagaggccatgccgaggtcaggcgagtctgcaggagccaggacacggagctgggttttcagcttagatcagaggctaggggtcagccagggcagaggctgggatcctagcagggtgaaggcagagccaggacaggagccaggcaggcagatcccagacagggaagcagaaatcagatggcttgcataaaacagcagcaacccagagcctggacactggggcttctgctcccttagacaagaagtctgctttggtatgtcgggaaggaggcaaatgagagaaacctggccaatggtagcttattccataaggacatttattgtttattccacaagaagtccaggagcagaggtggtctcgggattggtttggtgtccaaagaagccaggctcttcgctgacttcttagtgagctggttgatgcctcatgattataaagtggctgctgcagctccaggcatcacatcctcaccttgtatgtaaaggcaggaagtggagggtgaggtgaagcacccaaacagactccttacgtttcatgagcctgtgctggggcaatgtgaccacctcctggttgcaagggagctgggaaactgagtacctggccaaacagaaagggatggctctgcctggctcaggctggtcctgattcctttcctgggtcacatgtacagagtcacaagagggagttctggggcaagagaagaaggggcattgggggccaggcaacccacagagtctgctccatctgctctcccactggtgcagacctagaagctggtccaggatttctgccaccctctattcctgggacaggctggcaggcagaaggccagcagggtaccggggaagattcctgcttgccctcccctctcctgccccgggctttactctctgacctcatggaccacaaacagtacacaagagtcacagaagcctcagagtcccagcagtctctggtgcagagggcagtgtcccggctagtctgccaggccacaatgacatcatcagggccactgcccccgaaggccgtggcctggttttcttggccccacgcccatggctgcccacccgggtgagctcatgcctggacagaaatgggatcagtttctccaggtcagacacagccaggccaggagggctgagacgctggcaggggcagattccaaccagggctcctctgcccaggtctgcaggctctgtgggcaggggtgtcccagtgggaggtgccccatgaaggagagagctaggccttttgtactggctggcaggtcacttcgggggaagccagagctttgcccagaatggggaacactagaggttgcctgtaggaggccaaggcgggacccctccccagatctctccaggcttcaccctgctccctcctcctccaccctagcctccccacaccatccctgcctcctctcatggtcctctacctccacttcccagcccttgggaccaccccctgttaaatatggccatctgagttccccttgggatactgcaacccacccccgccaacttatcaccttcactcccaagcctgcccctctcccgtgcccttgttcgactgggggcatttctactattcccagcagccaggcctgaaaggggagacacactccaaccttcaccccacctcctgcccccagccccaggagcaccagggcctgacgctcctccaaatcccctgcgctggccatcccaggccccttccatcacgtgacctgacagccaccgtcttcttgctcctctccagagcccctaaacttggctgtggcccgtcagcttcttcaggggtgccagtggctggggcaggaatcggaacccttctctcctcctggagattcaggagaacggggtccacccttcactgccgtgtgatctgagccagctgtccccgctctctgtgcctccacgaagctcagccggggttgagacagaactgttgggaggataaactgtggtttggtggatgaggcaccactaggggccccggcctcaccgcccatttgctgggtgatctcaggcaagtcacttgcagtctctgagcctctgtctccacctcatttgtgatgtcgccgcagtgaccctcccagtttcatggacccttctaaggaccagaaaggggaggggctgaaagaattggctctggggggttaaggggccctgggccaggcatccaggccatcggaggactgtgtcccatagaggggtggagggggagcccgttctgcagcccacagcagggcctgagcccagggggcccagccagaaccctgggtgcagggtcagagccctgagcagccgctaagtgcaccctggagacacccctgctggggaggagcccagagcaggccactttgtccccagggatcccaggactgtcccccaggcccaggggcactgcagaactggtgagggagctactcaggcagaccatctgcctgtgcaccatggactctcagctcagcccagcaggtccttcacgcccctcggccccaggacccacccaagttcccagcagggatctccacccaccctgagcctatttctggcacacagcgccccctgctggcctcttcgggggcagcagagactcacggggcctctgagtcctggctctcaagttgtttaaaggaaggagaaagtctcccggtcccgggatctgggtctcagccacctttgactcctgcctccctcaaggagggacagatggggccgcattgcaggctggtcccaagcaatcgtggccacttttgtttttctggaaagtcttctaaaggtcatgtgccacaaggggcctatttatacccaccctttcactctcctccctccctttcttcccttccttttctgtctgtgtgtgtgtgtgtatgtgtgtgtgtgtgtgtgtgtgtgtgcgtatgtgtgtgtgctttttttttctctctctctctttttgtagatgtggtctcgatctgtcacccaggctggagcgcagtggcacaatcataactcactgtagccttgaactcctgggctcagcctcctgagtaactgggactgcaggcgtgtgccaccacgcctggctaattttctttattttttgtagagatgggggtctcactgtgttgcccaggctggtctcaaactcctggcctcaagtgatcctccagcctcagcctcttaaagtgctgggattacaggcatgagccaccactcccagccagcacagggactttgacggtgtctgaagggcactccttgaacctgagggtccagaaagactttcctgatgtcagaaggaggagagggctgggatggagggaacctgggccacgagtgaggttctcccactaaggagcgtgacggggcacacacagcgtggacagctgcaggtctcatggggtgcacatgcatgtccctgtgtgtcacgcatgtccctatgtgtcaggcccaactgggacctgactctctatctcctttggcccaggtcctcctgctagaagcagcagaacggccctccagcccggacaacgacctgccagcccccgagagcactccgccgacctggaatgaggacttcctccccgacgccatccctcttgctcaccctgtgccacgacagagaaggcccacgggcccagccggtgagtgagggctgcagagaggacaggctggggcagccgaagggaccttgggcatggcctcccagggcctccctagagaggccacacactagacactctagttccaacatgccatgtggcattttgaaaaattaagctaacagttgaaaatgggtatttcacctaaaagccaggatttctagtttctcttaagaagtagacgatctggtcaggtgcagtggctcatgcctgtaatcccaacactttgggaggccgagaagggtggatcatttgaggtcaggagttcgagaccagcctggccaacatggtgaaaccctgtctctactaaaaatacaaaaattagccaggcgtggaggcaggtgcctgtaatcccagctactcaggaggctgaggcaggagaatcgcttgaacccggaaggcggaggttgcagtgagccgagatcacgccactgcactccagcctgggggacaagagcaaaattccgtctaaaaaaaaaaaaaaaaaagtagaccatctggccgagcatagtggctcactcatgcttgtaatcctagcactttggaaggtcaaggcaggtggatcatttgaggtcaggagttcgagaccaacctgggcaacatggtaaaacccccatttctactgaaaatacaaaaattagcccagcatgattaatcccagctactcctaaggctgaggcatgagaattgcttgagctggggaggtggaggctgtagtgagccaagatcatgccactgcaatccagcctggaagacggggtgaaaccctgtctcaaaaaaatagatgatcttgggcaggtgcagtggctcacacctataatcccagcactttggaaggctgaggtgggaggattgcatgaagccaggagctcaagaccagcctgggcaacatagtgagaccctgtctctacaaaaaattataaaaataaaaatgagaaaattggccatcagggctggcagtccctcatggaaacaaccagctactgggttgccactgtaggtccagtccaggctgtgcagtttgccgcagtccccaccattccctattgtcttacagctcagctactgtcttcagtatctgccctgctccttggcttctgcacttatggcccccagcccagccttgctgggttcaattttgcagcattctgcctggccagggagcaggaacttactgcttcccacctctttctggggtttgctctctgaactctctggctggaattggaggacatctgcccccctgccttcctgccacacttttacaattttattttattttattattttattttgagacaatgtattgctctgtcactgaggctggagcacagtagtatgatcatagttcactgcagccttcatctccgaggctcaggtgatcctcctgcctcagcctcccaagtagttgggactacgagtgcacaccaccacacttggcttttttttttttttttaatttttagtagagacgaggtctcactgcgttgccaggctggtctcaaactcctggccttaagcaatcctcatgcctcggcttcccaaagtgctgggatttacaggtgtgagccaccatgcttggccctggccacattttaaagttaaggggaagaattttccctctgcagattctacctactggtctgggctctgccacctggggctgtaattacctttgctttaatcacaattgtaataatcatagttgcaatcgatgaagccctcctggttgccagacactgaggtggggctttatcctggaggacatttagcaaacaacacctgtctataaggctgaatccaggggttgaaggctgaggtctaccatgagtggtcaggatctgcactgtgccagttattaaatattttcatatcagatatgaaaatatttcaaatacagatataatttttttttttgacatggagtctcactctatcactcaggctggagtgcagtgtcgtgatctcggctcactgcaacctctgcctcctgggctcaagggattcccctgcctcagcctccctaataactgggattacaggcacgcaccaccaagccccgctactttttgcatttttaatacagaaggggttttgtcatgttggccaggctggtcttgaactcctgacctcaaatgatctgccctccttggcctcccaaagtgctgggattacaggtgtgagccagcacacgcagcctaatttttgtatttttagtagagacggggtttcaccatgtcggccaggctggcctcaaactcctgacctcaagtgatccacccgcctcggcctccaaagtgtggaattacaggtgtgagctagcgcacccagcctacagatatcactcttaatcttcacacaaagcttggaagccttgaggttacaggggagacacctgaggctcagagaagttaagtgacacccctggggtcacccagcaagccagcaagctgggggcattttgcctccatgattctctgcccttagagccctttggagggggcgctctccctctgccctctgttctgagtgtctattctgatgctgggttggggagcaggggcagagcagggaggagagatgcatgacacaggtggcctccagtggccagtcccagggccggggaaggagagtagggtatcctgcattcttggaaagggactgaaggctgcgggaggagggccgagctcaggtctcctacgggaagggggacctctctcactctggcccccggcctacccctcgagccgctgtccctaaggtctcacccccagagcgttacctcatgcccacattcttcagatctttcttgggggatggaggaggaggggcttcccatcccaccggggacccaggcccacgaaagcgcatgcctggcaagacctttccaaccaggggaaaatgcagtttcaagaatggccaccaggtggggcacacactctacacatggtgacacctgcagccaacctggattccagagcgcaggtggggctcttccgaggccagcagcccccagccaggccctccccaccataccacagtcccatgcaggcagagtgcaaagggccctaagactcagtgcaggtcccttcatcagatcagcaaactttttttttttttctgagacggtctcgctctgtaagccaagctggaatgcagtggtgtgattatagctcactgcagcccagacctcctgggctcaagccatcctcccacctcaacgtccccagtagctggggccacaggcgtgcaccactatgcccggttaacttttgtatcttttgtagagatggggtctcactatgtggcccaggctggtctcaaactcctgggctcaagtgatcttcctgcctcagcctcctaaggtgctgagcaaacatttttcagcatcctctctgggccagagggagaaaaggctgtcccctggccacacagcaagccttacctctccatctccttgtccacccttggggtttagagatctgtagctgggaagatccatccttcaggacctcctggggcctcctcggaggccacctgttggggagcactttgccacaagcccggttcttgaccctaagcagagagacagcagggtgtgagagagggacctggagctaagcaacttcatctgcagcctggctgtgtgagcttgggcaagggaccaaccttcctgagcctcagtttccccacattgaaaatgggaacgaaagcagttcttagaatcatagatgtttgtaagtgcaaagctggtttgtaagttgtaataaccagctccaaggtgatgtgagtgcctttgcctgtttagggagtcccaggtaggcagggctcctgggggaacgtaggctgacagcccagggggccaggcctggagccactggaggctgggggtccaccatgttctgatgccctgtctccttctctccccagggcccccggggcagacaggaccaccagggcctgcaggcccccccgggtctaaaggtgaccgaggccagacaggagagaagggtccagcggggccgcctggtaagaaaaccccccacatatgtgatgttgtcaacctgcggaaggggctgggctttcttctctactggaacaggcgaggtgtcccacgcacccacagccctgatcttgctgggtaccagaaaaacggggtcttttttttttaattttttgagagggagtctcgctctgttgtccaggctggagtgcagtgatgccatctcggctcattgccacctctgcctcccgggttcaagcaattctcctgcctcagcctcctgagtagctgggattacaggcatgcgccaccacacctggctaattttgtattttcaatagagacaggatttcaccatgttggtcaggctggtctcgaactcctgacctcagatgatccacccaccttggcctcccaaagtgctgggattacaggcgtgagccaccacctcacctggcttttttttttttttttttttgagatggagtcttgtgctgtgtcgcccagactggagcacggtggcacaatctcagctcactgacacctccacctcccaggttcaagcaactgtcctgcctcagcctactgagtaactaggattacaggtgcctgccaccatgcctggctaatttttgtatttttagtagagacagggtttcaccatgttggccaggctggtcttgaactcctgacctcaggtgacctgcctgccttggcctcccaaagtgctgggattacaggggtgagccacaacacctggccaaaacagggtcttcaggggcttcgggtacaggcatgagcatcgaggctgtcaggggccaggagcagttctcagccatttaaacacctccagagaccaccctctcaactcctcctgggtcctgccggggaaggacccctggttcagcaggtacagggccagcccaggatggtggcttatacttggtgttcctgccacagggctgaagtccctgggagggaccaatgggcctctggccagagcctttgctgatttcaccgtccctgcccccctcaccctcccaagctgccactaagtgtcccctctggactgggctgggaagggaagcccatttcatttacaccccaggacacccccaaggaagactgtggatcggaggtcaccactgactgcctgtgggcccctgaccaaccctgtttctttcaaggcctcagtttccccatttgtaagttgcagccacccgccaggctccggctgccacagtgactgttcttttcctcattgcagggctcctggggcctccagggccccgtgggcttcctggagagatggggcgccccggccccccaggaccacccggcccagcaggcaacccaggcccctcaccaaacagcccccagggcgccctctactccctgcagccgcctacagacaaagacagtgagtaatgcccctggggggccaagggagggctgagctacgctgtgttctgggagggatcagccttccttaaaggatcctgggaagtggaccccaccacatgcccatcctgctgcacccaactggctcactcctgcaggcctcctccaggaagccctccatgcagtgtccagggcctgccagtgacgatgacagggaacagcttgggagcaaggcttggtcctggggctaagcatcctcaagtggacccagggctagccccaagccctgcttttggccccaaagtggcctgtctctgcctcagtgctcagctccctgcctttggggttgtgagccccaaagttcactctgctggctgacttggcccagattccctacctggctaccccaccccaccaaggttatcccttattgtacttgttcctcacccgccctcactgcaggtcattcagcaggtgtttagtgagcacctactatgtgcaaggcacaggattttagccactggggacacagcaatgtgcaaaacaaactccggccctcgggggcaccggccagtccaagagagcctctgaacacacagaaatgtccacttctaccttgggaggtggggacaaggaggtgcagagagtggacgggaccaggactctgggcctaagggaccatgaggtagtgggaggccaggcagaggagtccgtgagccctgagaggagcatcatttctggttaagtgtcccggcaactggggaagatttttactttaattttttttgacatagggtctgttgcccaggctggaatgcagtggcgccatcatagctccctgcagcctctcactcctgggctcaagggatcctcccacctcagcctcctgagtagctaggaccctaggcatgtatcgccacatctaactaatttttttttttttttttgagtggagatggggtctcacaatgttgcccaggctggtctggagatgtggtctcactatgttgggcaggctggtcttgaactcctggcctcaagtgatcctccctcctcagcctcccaaagtgctgggagtacaggtgtgagccactgtgcccagcctggggaagggttttatgaggaaggtgatggcattgccctggggccctgggtctggttcaggattggccagggtgaatcaggtgaggggctcatcctggagggccatgggagatgggttgttaaacagactccacccctgctccaggcagtgtggtcgccatgatgtaatcagactccccaggcacagctcagaggggtgggcatggagggcttcctggaggagtgagccagttgggtgcagcaggatgggcctgtgggatggagcctggaagaagatgccagcctggggcattggagaagtgagcagggcagacccagagtctgaagagcctggaatgttctagaaggtatttatgttttatatgaagctgaccgacctggctttccctgctctttgtctgggcctctccgtgctcctctgagcagtgggggcaacagtatctgcagcgggccccagggtgatgggaggagcccccctgggcttcgtgtggcctggctcagggctcagtgccccggaccagcctcccagcactgccaggtctgccccaccagacccctggccgctccgctcttcccacagatggagactcaaggctggcctctgccatcgtggacacagtgctggcaggtgtcccaggaccccggggtccccctggtccaccaggtaagtgaatggtgggctggcctgcattgaggactccatccccccagggctggcctgagccatggggccttgaggggagctggaggtcggctggcggtccatggcttctgggcaatgctggggactgggtctgtcccacccgctgtgtggcaggaaatgaagcccctcgtttcctagtggcagtgcccctgggggactggatgcatgaaacccacgtgattctgctggaataagatgcctgcatgaggctgcccttgcatgggccagagtgggacacacaccagtgggggatggggtcaggacagaggtggcaggaagtccctacctttgaggcagaaaccaaggggttcaaaggggctgggacctggctgtcagtcctggcctgaccttccatcatccacattcctcattgggggaagaatgcagggctgactgccttgtccctttctgcccgggaagggagtcattcattcattcattcatttgtttattcactgattcattcattcttttattcattcatttattcattcattcgttcattcattcattcatttgtccattcattcattcgttcattcattcattcgtttattcattcattcattcatttctctgtgcgtctcacaaacattcattgaacatctgccactacatgtgccagacagtgatctaggttcccggaactcctgaataatcaaaacaaacatcatcgagaaactctcattctggtggaggacaggaatatcatcataaattgtgacttcgacaggatctgagggagctacaagggagaagctggggcgtggcggggaggcgccgtcaaaacgtgacatttcagaagatgctctagggaggagagggagtaagctcagagggtacctgggggccttcaggtgacatgccaggtctctggagaactggacagactcctgacatttgtcccctggagtgcctgtcctcacatgccctctccaaacctgggagccaggccatgctggacagcccaacatgcggctccctgcaccacagggagggatcatgagagaccctccctgggcccgtgtggggtcatgagagaccaagaccttactcttcctagcaggctggagattagtcatgaatctccctccctgagctgggcacacacatgagacccagcccggccctctgggtactccacatcccatggggcagacagacgtgtaaacctcagtggccatgggcggtggctggtttacataagggatttgcctggagaagcagtggaaagctgggaaggcttcctggaagaggtgatgctctgtgtcagactggtaggaaaaccagtaggaaagggtttgctgggagagtggaggaatagggaggctccaggaggaaggacagctttagcagagacgccaggagggtgtctggctggggcagggagggtgggaaggggccgggctgaggacttcaggagccctgaaagggatgtaactgggcttggatttttgagagtgtactcttgggggccataggaagggtcgatgatcaggaggctgttatagtaaccccagcaagagggatgggtcccaggtcccgaggcgggaaagaccggagagacgtaccaggggaccaactggctggggcgtgggagcagtctggacggacttcctcccttgcctgccgggtctcgggattggggctgcgtcgtggacgaggccctgggaggaggaggtgtgggagctgtgggcagccggtggagaggaccctgggctccgaggatggagacctcgttgagagggggtgtgcctccctcctccccacaccattcattcccaaaccctcctttacttcccatggagacagatcaagaacaggtgctggggtgggaggctgggggcgccccctctctggccccaggtgaccatctgtgactctgcccacaggtccccctgggcctcgaggtcccccaggacccccaggaacacctggatcccaggtaaggactttgccattttaggtagggtgtgggaggcggcgggtggcgggtggccttgtctccctaggggagaagaagcacctttttaccagcaagagtcactcaggaaggagccagtcggcctggccggtgagattttattttattttgttttatttatttttaaatttatttttgagatggagtctctctctgtcacccaggctggagtgcagtggcgccatctcagctcatgcaacctccacctcctggattcaagtgattctcctgcctcagcctccggattagccgggaccacaggcgcacgccaccacgcccagctaatttttgtatttttagtaagagatgggatttcaccatgttgcccaggctggtctcgaacatccgacctcaagtaatccatccgcctcagcctcccaaagtgctgggattacaggtgtgagccactgcgcccagccgagattttaattttattagcagcagtgactctttgctgagtatatcctcctcctgttatgccagggaggtgttagcatcactcgcatttcacagatgagctaactgagtcccagagagaccagatgctgcctgaggttgtacagagggtgtaggcagagttgggccaggtcacagaatctctgcctcagcccctcaccttgccctgagaattgcccatggggaggcggcaccccaagcctgactcagcccctaaccccaggttcgccctgcctctgcagctgtcagaagtcaggaagagcaggtacaaaggccctgaggcagggaaaaggctggcaggtagtgagcaatggagtgtgtggtgtcggatgaggcacagtgggcagggccttatctacgggtcccaggtgtgggcttttgttacagtggatggaattattgagtttcagggagggtgattccatgatcttatttacatctttaaaaagctcctctgaggggccaggtgagatggctgacgcctgtaatcccagcactttgggaggctaaggtgggaggatcgcttgagcccgggagtttgagaccagcctgggcaacatagcaagaccccatctctataaaaaatttaaaaattagcctggtgtggtggcgtgcgcctgtagtcccagctacttgggaggctgagatgggaggatggcttgagcccaggagttggaggctgcagtgagctctcatggcaccactgccctccagcctgggtgacagagcaagaccctgtctcattaaaaaaaattaattaattaattaaatatgtaaaaatagaaagtagactcggcatgtctggccaatggaataagtctggtgagaagggcagggaaggctgtagtttcactccctggtgtctgtcaggagcagctgggaggaccagggaggcatttcctgagaaggggaggcttcgggatggggggcaccaggagttccctttggagagagggggagtgggcacctcatggtcagctgggtggcgatgtcaggggacagctggacacgggcctggggctcccgggagccgtctgggctgacatcagcacacgtgggaccctggccatcgctgttagtatcactagttctctccacacaccggaccacctgctccccttctctgcctgacagccgtacgtggcattggcccattttgcaggtgagaagactgagggctcagctggggtccctagtcaatagcagctccaggtggctccaggactggaggcctttgagtctgcccttcccgtgccggccgggccatcctcctctcccttcctcttctgcagactcagagcacagtgggcggggaggggggtggccagagggcactggagacttggccaggaccggcaggcctcacacgcttcctttggttttctgcagggcctggctggagagcgaggcacagtggggccgtccgtaagtgtgggctgtgcagatgggcctgggccactcccaggcagaggctctgatgcaagcccagggcactgggtggcgggggttggtgggggggttcagccctgggtggccctgctggagctcaggcaacagggagggactgagaaaggactcaaatcgcctcctgctgcggggtgaggagggaagcgacctccagagagtgcgctgacagtcctgagtgcctgcagccctggattaatgcactgtgtgaccctggcctttcattcatgcgctgtgtggcctggggccataggttaacatgccgtgtgacctgggaagtcccttcttttctctgaacctcccagaaataggcttagacagccttcctttaatcgactttcttggaaacaagaacttatgagtctcccagcctgaccaacatggtgaaaccctgtctctactaaaaatacaaaaattagctgagtgtggtggtacgcatctgcagtcccagccactctgaaggctgagacagaagaattgcttgaacccggaggcagaggttgcagcgagccaggatcacgccactgcactgcagcctgggtgacagagtgagactccatctcaaaaaaaaaaaaaaaattatgagtatagactcctgcctctagggccaaggagtcaggcgcttccttgatgcccaagcctcactgtaggggtgtggggcggggaggaggagtggagctttgctgagcacctactatgtgctggccacagtggaggtgctctcttcccccacagcgcatgtaagcttcacagcgaccccaagagaccatgctttattatccccgtttgccaaaactggccactaaggctcagagaggttaagtaacttgcccaaagccacacagcgaggcagtggtggagcctggatttgaaccagggagtgtcaagctcccaagccatgcctcctcccgtgcttgtctagtgaccaaacacaacacaggagacacaatgatggcacttctaggtgccaggctctaatctaagctcattgtccctattgattaacttaatcctcctaacaacagatgagatagatactattactgatcccattttacagttgggaaaactgaggcaccaagaagtacagtgacccactcaaggccacacagtagtagctggacatttacatgttactgtgagctgggcatggtggtggctcatacctgtaaccccagtgctttgggaggccaaggcaggaggatcattttgaggccaggagttcaaggccaccctggacaacatagtgagacccacccccatctctataaaaatattaaaaaattagctgggttgtggtggtgcgtgcccatagtcctagttactcaggaggctgaggttggaggatcacttgaacccaggaggtagaggctgcagtgagccatgatcgcgtcactatactccagcctgggcaacagagcaagaccctgtctcaaaaaattggctgggtgcggtggctcacgcctgtaatcccagcactttgggaggccaaggcaggcagatcacctgaagtcaggagttcgagatgagcctggccaacatggtgaaaccccgtctctactacaaatacaaaaattagccagacatggtggcgcatgcctgtaatctcagctactcaggaggctgaggcaggagaatcgcttgaacacaggaggcagagattgcagtgagccgagatcacaacactgcaccccagcctgggtgacaagagtgaaactccatctcaaataaataaataaataaaatacaataaaatatgtgactttgaatctggtattactggccttgtgttggagacagacagcagcccttccaggcaggctactcaatcctggaagggcccaggcatgaacttgccggcttcctagcctgagtctcttctgccccagaagcagaatgaagcacttacagccaaccctggacacttccctgccatgccaggctgagcaggctgtgccccggagccgtggcctcccctgctgtgctcagcccagggcaggagtcccctgggcccagcacccgtttcccaggccctgcctgcccagcctgcccctgactccctgcaggcccccagggaactggagagggtggagaggtgcccccacctcccgttccagtgttgactgtgtgacttgcttcttagggtgaacctggcgtgaagggggaagaaggagagaaagccgccactgcagaggtaaccatggctgcccttcacgttccctcccgcctccttggctgtgagcactgtcacgggagggcaggtgccccacagatctgcgctgaccgtcagccagccccgagctgggtgctgggccaccgggtgtacagggcccctgccctgagaagttcacagccccatgggaactcagctgagtacagcagtgattgcaagagagtgagaaggtggctgggtggggatgccacagagggggtgattggcccttgggggggcttcccgggacagggagaggagtcgcaaacttgtaggaaagacagtctccctggaggaggcgtcaggctgcagagtccctctcaacggaccgggttctcccgtgaatggcgtctcggcatgggcgtgcttacaaggtcaagggtgctgggggactgaaggggacagggctgctggatgtggtagaggatggatggaggaagagggacttgcaaactgggaatctgaggagagaagattggagcaagcggaggctggggccagtgggagggggcagccagggcacgggcttggctgtggggacctgcggcttctgggaggaggaggggaggctgaagctggggtagtggatgaaggggatgaagggctcatctgaggtccaaagtcaaattcctcccctcagctggccctgagctaggtgctgggccaccaggtgtacagggtccctgccctgagaagttcacagcccagtgagggacacagctgaggacagcagtgattgccagagaatgagaaggttgttgcgtgggggtgccactgagatggggccggcagggggggccttgaaagctaaaagcgaaagtgcctgagcagggtttcccttgagtgtgtcaaagctgggtgggcaaaacagctgggagggccagggcgggtccaggggaccttcaggaagtccttgcaagaccagagaaagggaagaggctggaatcaaggccgctgtgaggggtgcaggaggtagtaagaggggctgaggcatgagcctgatacactggtcactcacagcagtactctgagaggtgactgtgaccccctccatttcataacagcaacctgcctggcctgtaatcccagcactttgggaggctgaggtaggagaatcgcttgagcccatgagatcaagaccagcctgggaaacctagcgagaccccatttcttaaaaaaaaaaaaaaaaaaaaaaagtaatgagacaggcgtggtagtgtgtgcttatagtcccagctacttgggaggctgaggcaggaggattgcttgagcccaggaggttgaggctgcagtgaactacaatcgtgccactgtactccagtctgggtgacaaagcaagaccttgtctctaaaacctaaaaaaaccccaaaaaacaaaaacaaaaaaaccaaccacctgtggcttaggaacatgaggctcagccaggtcccttggtctcccctgctccttctctgagttggggacacgacactgacatccctgtcccagaccctgtaattggctcaacttcccattgtctttggtcccctggtgggcagacctttctcctataacccagtaggatgctttttggtttccttttgtttcattttaagctaaattaatctgaacataagacagatctgtcatgttacaccagcaaaaggcacccattctgctgccaactcccagggctgggcaggatggggacagtggctttgtctcctcatcatcacttttcagagtggcctcgacacctgccttctcaataagtcagcaccctgtcttggctgactcaggtgtctctgtgcacaaggtcctctgcttgtgtgcagaccgggcccttgaaatacagactctgccatcacgccagcctgcctgcctgcactttgaaatggtggctttctctgctgtctttcttgcctggcatggccacacctaccctgccccttgcctgctgtttggtggcgagctcttgggcattcaaggaaggaaacaagcaaagaacttcctaccttcgggccctgggataggtgctctgtcctggttagggtattttcaggacatgtgggggaagctgacaggcagctatggtggaaggaaaagctcaggctggaggctgacaggtgtggatctgcagtctggatcggccgctttgccaggctgtgtggccgtggggaggttgcctgccctctctgtgtttcaagctctttgtctgtgaacagggtttgaagccctgtctggcacatagttgatgatgttcagtctatgcttatttgcagtggtgagggtgtcgggtgggaagaggcaggggtggggggctttgaggacacatacactgtcactgtatcaggatggccctgaccccttcctcatggccggccctgaccctgcctgtttcctccccgccagggcgagggggtgcagcagctgagagaggccctgaagatcctggcagagcgagtcctcatcctggagcacatgattgggatccacggtgagcagtgaccaggatcagcgggctgggaatctctctcccctccttcctctcccaatgctgccctcatggctgctgcctagggtctctggtctccctcccttgcccctagtctgaccctccccctcccctgctcaaggaccctcagtggctccctgctgcccttgacagacttccaagtgcatcagcccagtttcccagcccctccctagtatagccatggtgggcagagccctgcccagccatgttgaggcccctcccacctccatgcctttgctcgggccatgcctctgcctggtgaacactgactgccacttcgggacctgctcaaagatctcggcctctgtgaagccttctctgaaccctcctctttgtccctatggtgacataggggaggcttccattccatgctggggtttctgtgaccctctgggagtcccttgtgcagaacagtgaatgatacctctgcagggcctggagtagaggcccatcagcatttgctggaaaatgaatggatgaatgaataggtgaatggacaggtgggtgggtgagtgagtgagtgaacgaatggctggttgcctggatgaatgtatgcatgggtggatgcatagatagatgaatgaatgaatgaatgaattgttgaatggacaggtggataggtggatgagtgagtggatgggtagatgcatggatgaataaatgaatgggtggatggatagatggataaatggatggatggatggatgagtggacaggtgggtgggtgaatgagtgaatggatggatggatggatgatggatgagtgaacaggtgggtggataaatgagtggatggataagtgggcaggtgggtgggtaaatgagtgaatagatgcatggatgaatgaatgaatgggtggatgggcgggtgagtggacaggtaggtgggtgaataagtgagtgaatggatggatggatggatgatagatggatgggtaaatgagtgaatgaatggatagatgcatagataaatgaatgactgagtggatggatggatggatggatggatggatggatggatagatgcatagatgaatcaatgagtggataggtgggtgggtggataagtgagtggatggatgggtggatggatggatggatggatggatggatggatggatggatggatggatggacgggcaggtaaatgagtgaatgaatggatagatgcatagataaatgagtgactgagtgggtggatgaatgggtgaatggatgaatgggtggatacacagatggatgaatgggtcaatggacaggtggatgggtgaatgagtgaatgaatggatggatgcatggatccatgaatgaatgaatgcataaggggctgaaagcctgctgctgccttgcttctccacgctgggcaagagcatctctccgtggccacatatcatgatcaaatgtacccccaagtgttcctaaggctctacctcgagtccaccctcctgctctccttccagatcccctggcctccccagaggaggttctggccaggatgctgccctgagagccaacctcaagatgaagaggggtggcgcccaacccgatggggtccttgctgccctgcttgggcccgaccctggacagaagagcgtggaccaggccagcagcaggaagtgagagcccactgctccaggacaccctatcctggctagagacccagccccagaggcctgagccgccgctgtttcctaaagatgcccccaggggaactgggctccaggcatggatgattgtgaggacatggggggctttggggacagataatgtctccaggggcagggtctggaggggccaacaccctcatcagagccctcctctggcctgtcccctcccctacccccactcccggctggagacggggtctgggtgggctgggtgctgggaatgagaataatcctaatacccatcatttattgagtccctgctgtaactggccctgtccagggaactttcgttacgttgtctcattatttaacccttaggaggtaagcttattatccccacttcacaaggggaccgaggctcagacggtagaaataaccctctcttggccaccagatcacgggtggcaggggcaggatttgaacccaggaccctcagttcctgaagccatgttctctcgaccctgccagcttcccctcttcgagagaaaactcagacagggagggcgcagggccagaacggctccttaaggcaggcagggctgcggggaggctgggccagccagcctgagggggtaggcagggtcctgcagggcctggggcttcccttcctcatcccccttccccactggctgggggagcagcctggactgcagctctcagaggccagggagaccctgaataaatcactgccagccatacggacttgaggaccttgagagagaagcattgggggtgcaagtgtccaccaaaccagataggcatccctggccactgcctcccagtcttgctgagcccacccgctctctctgggtccatcccatccctgagccaggggaggcagcatttcatgggcatgtctatcagaggtgggacttgcagcctctgccccacgagtttgtctctcagtggactctataggtttgctacttttgcatgacacagcaagcccagtgtcccctttgcaagctgcagagagggaaacagagtcccaggcctgctgggaagagatgctcctgcctcccaccttccagagttgggggcctggcaggctccatggcaggcaccaggtccctagcagcccagaacagctctgactggagccctcaaggcctctggggccagggtctccgtgatcagctcagccctggtgttcctctcttgctgggctgggacctgggacacagccacggcagcaaactcagagaattgaaggtgctggcgccaccctggggcactctgtcttcacagcaggagtgactgtctccagtgctcttggtactcctgtttggctgtggcctggtccctctgggccctgggatcttcttctggcccttgaggcaggtctggagaggcagtctctgtcttcatggaggggtggtcagaggcgggcgggaccaccagcctgtagcgttattattatatgtgacaataaaggtgctctccccactgtgggtctgtttgtgtggtgacagctctgcaggaggctggtctgcatcttaccggccaggtgccagggaagctgtgagcagctccagccaggcccggggtgaccacagggcctctgtggcagggaggtccagctctgccctcaggacctccagggagggggctgggagtgacacacgataggcaagccccggattggggcttaacctgcaagggctcttggcttcacccagcaaagaattcaagggcaagctggaggcaagagaaacagctttattggaggggcaggactacagctccatgactgctcgtgcagagcagggcttctccccaggcagagaatagcagctcagggcagttctgcaccatatttatacctacttttaattgcatgcagattaagggctggtttatgcagaaatttctagggaaagggtggttatttccgggtcatcaggtctttgccatggaaaagggcagtggctcctgagtgttgccatggtgatggcaaactgacatggcacactggtgggcgtgtccaatggaaagatgcttccgctctgtccctgttttggctagtcctcaatttggtcctgtgtctgagccctacctccagagtcaagatctgtttcttacctccagagggtgagggaagccccttcagaggccacctcacccctccacccaaccacactgtctataaactgggcctggcccccagctctgcaagaaggtgagttaagttggggcggcctcagggctcttggaggagcaaccctgatcctgctccatgctcctgtccaggtctggggtcagtgacatatcagagaccccagggagacccatataccctgatgacaagtcccaggtacaacacagagacccaaaccactgctgaatcaccctgtgacccttgtaggtattaagctcttgccctgtgtattatgtctgttctcactctgccaataaagatatacccgagactgggtaatttatggtaatttataaagaaaaagatgtttaatggacttacagttccatgtggctggggaggcttcacaatcatggtggaaggggaaaggcacgtcttgcatggcagcaggcaagagagagaatgagaaccaagcaaaaggggtttccccttataaaaccatcagatctcgtgagacttacttattcactaccatgagaacagtatggaggaaccgcccccatgattaaattatctcccaacaggtccctcccacaacacatgggaattatgggagctacaattcaacatgagatctgggtgaggacacagccaaaccatatcaccctgtgtccagtgcccagtgctcagctacagacagaaccctgcctgcctctgcctggagcttgaaatcctatagagagggtgagcattgaacaccacaccaggccaggcatggtggatcacacctgtaatcccagcacttagagaggacaaagtgggaagattgcttgaggtcaggaattcaag

SEQ ID NO: 117 - DNA, 161186 bp, Homo sapiens
  source 1..161186: mol_type = genomic DNA
cctggaagatggtttggcagctccttagaacattaaacacacacttcccctatggcacagctgtcttagtactgggcatttatcctaaagtaatgaagtaatgaagacttacattcacatgcaaacctgaatgtgaatgtttattcctatttataaccaccaaaacccagaaacaaccaaatatccttcaacaggtgaatagataagtgaagggtggtatgtctataaaatgccatcccgctcagcaataaaaaggaacgaactattgatacacataacgacttggaggaatgtcaaatacattatgctgagtgaaagaagacagtttcaagtctattattccattcctgaatagatgatctatgatgggggagagttccatggttgaagaccaggttagggtgcctgggcgtgttatacatagtacaggtttgaaggtttttaggtgatgaaactgttctgcgtgctgatttggttatgggtatgtgaacctatttataagttcacaattcatagaaatgtacatccaaataagtcagttttactgtaagttaatttaaaaaacataaaaactgctttcagaataactggtataagatgcatgggatttgaatgttgggatccacagtgttatattatcttctttgtactttcctagggatactaaattgtatataataaacatgataaatgaactttatacatatatatgtatatatgtgtacaaaattttgtacacaaaatatatgtacatgtacgaaatgctctgaagtggctcttaatacctctcagtaacttcagtagaaactaagtctaatgattttaattttcttctctacccttctatatactaaggagagcaaaagaacgcttttcaatggttttgtcaaaagtggtgaaaaggtggcgaatcgggtccctgccgcatggcctgcctggagcactgtgctgcgtgttcacattctgtccttcgtcttcacaatggctctggtgggtgagttaactgagagcatcatcgtattgagagcttttttctgagtattcagtaactcactcattctccgtggactatattctgatccagctcagactgaagcttaagtcattagggaaaagaaatcagccatctatttttttttcctatatcaagtaatacttggaatccagccctctactccactcctaatataactaaaatctcagctctaacccccagtggattcacacttaatggctatatatgtgtgctattcatcgctgtttatcttctacttaaccaatgcctgggaagtggcatttgtagagtgaatgaatggaaggatggagagatagatgacagctctctggggggacagagggaaggatgcaaaggagggagtgaggaggcgacgaaagaggaagagatggagaacaccaatctttttttccttgttgtagtcactataaatcacccccagtctgtgactctcatttggaagaagtgcaaaataaaaataatctaaggtatgcaaagcttacaaatttattagcagcttgtgcagtaagtttcttttaatgcgtctgtggcaatactagcaacaaattaataaaagcttaatttttatacaaatagttttattacaaatttgaattcttaagaaatacacatttaaagaaattacataaaaggccttagtagtcttagaaatgttttggagacttttagtgaaatgtcatttcaggcctagtggtccgaatctgccctcctgcggtccatgcgatgccctgctgaggtctgtgaacacagctcatgagaaaccacggaaatggcccgaatgtgcttacgtgtgaaaatactgatactgtgattcaacagagctgtttttcaagccaggatgcagaatgaggaatactaatgaaatgacggcctttaaggttgttgcttttgaagtcaagtcattcagtttgtgattagtgtttaaaaccctgaaaatatttaatacagaataaaaacaataagctcaaagtacatgtttcactataatagacaccatattcatgaacctgggtttggttttggcaacacataatttttggtttagaagtgaacaatgaaaacggatgtttcacattcaatatcctagtctttaaaaacctatgttaaaggacagcacagtctttcaaaggaagaaaactatgtaagctttattttaacagtggaagttaaactaaaccttgatctgcctaattgctgacatctatataaattactaatatatatatatatttaatttttgactatttttggaccatctttattccacaggaaaattgtgatttctgcaaaagcagctgcaaagtaccacacatagcagaaagacagaaatttatactggggggttggaagatatggctactgagtctgtaattccatttggaggttcaaaaaaccatttttacattgctattatttgtacagaccaagggacctaaattttgaaacagctagacagtgatataaacaaacatttatctctgggggtagaaaattaattataatacaagaatgaaaatgggcaaacagtatggaaggcacccacacctcctagcaccctttggttttctgatggagttctcacttcacacatcagtgcattggattgcagaaaatattgatattttatttcatcaaaagtgccatttggtatgccactattgaaagcttatcgctgtctttttctccttcagcaagtagaggtcaatgaagcagggtgtgttagttacgcaaattcctataaggcactttacggttttcatattggacagtgaggtacacaggatatatttctagggttcgttgctgttaacaaaaagaagaagaagtagcaccatgttgtgacattagctgagtcaggcttcattatgttcttctcatacagacttggcagcggctgacgtgcgtgcgcagctcccctgccttcaaggtggacggcgtaggcttcctaaaacacgacacagagacagaccattggccatcatctcacagcacgtcagaaacatggcactcctgccctgctcggaaatctctaagggatcagcccagcccctggcatcaggcctcaacctggtaccacccagtgagcaggcaggtgctgggtgcagtgcacacacggtcccacgcacacagaacactgcaggttaccagctgcacacccaggccctggcacctgccccagtgcccacagccccatagggcacagctgaagtcccgccacatcagtctggctccgaagccttggccattcccctctgtgccaccctgcctcctcgtactacaatttcactttttttccattctcctccactagatcataaactcctccagggtaagaagaagatattattcttctctgcaacactttacacacacagtaagtattcattaaatatttgtggaatgatgtgatgagtaataaatctggagtaattccctagacctcgaaatacttttataacttttgaaggatttctatgcagatggtctgctttgagaccaaaaagagggaaagacattcaatgtcccaagtgtttctcaagcttagaaactctacattattttgattgttgaaaaggtaaaatctgaactaaaattgttactgagaaaattctattaaaataaataaattaattaaactaaattaaaatagccatttatgagagtgcctcatcctaaaattgaggctgcttattttattaacttttggtgcaaattctagtaccctcaagtttattatttaaattaatgggatcttacctaatttgctttgggaaaacattttagtttattgtatcaggctgctggttaaaaaaaaaaaacccatcattacctatcaaccttataagaggacaccgcaagggctgaggcatgaacaaagtgcgctcattttggtagtgaatggttaaactctatctgcagcatggatgtcaagtttccagttccttgaaaggctccaataaaccaccagttaggcacgcggcactttttggatgagtaacgaattagagaagcgtgtatgttgttctgcctcttactatctaagctggaaagagacaggatcatagcagggttccatataattctctccaaaaaggtgaagatggaaaggctcatctccaggggtgagaagcgcttgttttggaaatgaacagtaagcagctgtgccagctccgtcagcctcctgcattggctccagcggggctgcagctggggctcgggatagagggttcattatgcgttcctggccttcggggaccggcccggctcccagtcaactccagcaaggttagtagccacttgggccagtcattttaaaggtgagattttggtaatggaaaaggaaggaagggtcttccctctcagtttcagctgaatttgtgctgaaattaatttttatttgcacaggtctaaaaaaataccttgtgaagtcactcagaacttacacaaagtgtacattacgatcagtgttatgaatggcatgaaaatgaacgctgctcacttcttctccccgggattgttaaatatactgtatttcaaacatgctctgtttggagatttcagttgctttaattacattttagtacactcacctagaaaaaatggaaaatgacctttttctttcatggttcttcggtaaatgaaaaaattaaacctgtgactgaaggtctgcctttgaaaatcgtctcggtcatctgcccatgtcgaacagcatcaaatattcattgctaaccatctttgagactttgcattggaaggtgttacggatcgcggatgattaaaaaataaagtcacaaaggggccagcagcctgcaaaaaagcagtgctcccacttacttgaacatctcgctcctctctatggtggcgagccaaaagctgtaagcgtttgcgtagtaattgcaggtcccacggccgtgacactcgatgaatggcgcacttctaaactcctccaggcaggagccgggggacgccagggcttggccagagccttctgcaccagcgctggtgtgctgcagaacagatgcgagccgtgagtcagaggttccctccccaaacaccaggaaagagatcgatccttcccaggaaggcgccagggtgttccctctggaaagccacacactgcagcctcatgtggtcaccacaggacacactctgtgcccaaattatcgggctggcccgcaagccagtgcctgcatggctggggccccatggtgctcagcatggccccagggatcgtctaatggctgcttcccaaataggtgaccagcccagcttcattagagtttaaagaagagctcactgtgtattagatttgaaacactccaacccattctaacatgggtcatgagacaatagccaaaatgttcaaataatgttgtaaacaactgatgtggaatcagactttacaaatgcattcctgtatttgctatattagatgctatttatcttataataaggtaaagaataatcattcaattttttttctttaaaaagagagaaaaacaagagaaagagaaaaaaatagctactactatatcaaattgcattttggtctagcaggtttaagtaggaccttcctgtactcagaaatcaagaccttaaaatgaatgacatacaaacttgactaagacattacaacagagccccgtgactattatttcagatataggaaatgtgaactctagaattttggagacacaagggacctttgaggacaaggctaactccactgattcccagctgaggacattctcggatctgaccaggatcacatagcttcaaggcggagcagaggcaaggacggggtctccagacctccagatcagagccaccgtcctgagaactcagaggaggtgctggaagacactgttctctagaacgtcactattttcgtttgctcctgatttagacaaattatgggcaatcactgtttcaggccttttgacacccggacaagggttggtggtgacaacagctttcctgtgggtcctcaatgcaactgtgggctttctctgacacacagagattccactcagtatttcttatgattatggagtggcgaatccaatctaccttttaatgaacatggcaagcttacatcattgttagtgtcctgatttctctatacagcattttcaacctttctggctctctcgataaagtagttacaatgcagcacttcgaattattgcaacaacctgttaatctggtggttgcaacatgaagagtgtagctgcagtacaatcaacccagcaaatcatacaatcaaacttgtacacgtgcacgaacattttaaaaattgctttcctgccaactttttctacacttggaaaaatgtgtagaaaagcacaagaaaaaaccagtagaaggaaatggcaatggtgggcgcctcgcacacagcacgtctggaaggtggaacagagaccctccacacggctggggcgcagggcagacgccacaccatccgtgagttaccttgttatctaccctcagcgtcctcactcaaacattaaaaaaatgctttcccgccaattttttctacaattggaataatttacagaagaaaatagctatgaagcctgtcaatcagataataaataatgttcatctgtgggtcaaatgtacaacttgcccattcctgacagtgtgaagatgggactaggacttccaatgatggtgcagatgtatgtgtagggtcatttactgggaattggcaaattccgggataactctgatcttacaagttcacggcttgtatatattcaatcaatactgccaactggggtaatagaataaaataagctacaatgagtgtatcaaacaggggccttgttttctgtttcagttggcttttgtgggaaagggaagccctggggctaggagagcagtccttgccctctgggaagggtcccaggcggcactgccccaggagggccttcgtggaggccacggccagccctcgggtgttctctccctaactcaagcttctgctttcaagctcgtgcatgttgtagtagaatgtgtactccccacgtggaggctctcttcctcctttccctgaaagaggcctccactccatgtaaagaggctggtcatatagagaagttggtcacatggagaagctgctcatatagagaaaccggtcatatacagaagctgctcatagagagaagctggtcatacagagaagctagtcatatggagaagctggtcatacagagaagctagtcatatggagaagctggtcatacagagaagctagtcatatggagaagctggtcatatagagaagctgctcaaagatggaagctggtcatatagagaaactggtcatatgaacaagctggtcatacagagaagctagtcatatggagaagctggtcatatgaagaagctgctcatatagggaagctggttgtatggagaagctggttgtatagagaagctgttcatattgctggtgctggaacagacccgtagagcacctgagtggagcagccacagggaagcagaggcctgggcctgcatttccaggaagatgctcatcccagctaccttggctgtgagcaggggagggttctggctggtgctggagacccctgctgtcaccaggcagggcaggccaggctttgaggcatgctttggaaggggatggttggaggaagaaggaggggcttaagcagcgagatgcagagaactccaaggtgtggaggcaccagacagaggcgactatggggcgtgagtggggctcttcccgggaaatatggcgtctccccagacacttaccatcacaaaagagtagccgatccacagcgaggaccacccgctggggcacggtgggatctgaatggtctggctgtgcacggccatcaccatggcaggcgcctcacacacagcacacctggaagtggagcagagacactcagcacagccggggtgcagggcagaggccgccctccatgcactgccccgttacctacactcaacatcctcactcagtctttctggtccaattacatattaagtagaaaacattgtgcccattgcttagactctgaggtttagtacctccccgttggttttataagcctgtctcagtattaaaacattcaattcaaaaatagagcaggatggctgggggcggtggctcatgtctataatcccagcactttgggaggccgaggcgggtggatcacctgaggtcaggagttcaagtccagcctgaccaacatggagaaacgctgtctctactaaaaatacaaaaaattagctgggtgtggtggcacatgcctgtaatcccagctactcgggaggctgaggcaggagaatcacttgaacctgggaggcggaggttgcagtgagccgagattgtgtcaatgcactccagcctgggcaacaagagtgaaactccgtctcaaaaaaaaaattagagcaggacacaggcctgtagtcctggctactggggaggctgaggcaggactgcctgaggccaggagttcaaggctgcagggagctatgctcggcctgcctgtgggccactgctctacggcctgggcaacatagcgagacctgcccctaaaatattgtttaaaaaatagatccaacacgagttatttaactgtctgtcttgtagaaggggaaaataggaaggcaaagctctaacagtggctctcctggaggggctggggttacaggcaacttttcttctttgggcatttgagtgttttccaatctttcaacaatgcatacgtatttccacaagcacaataaatgcttcagaaaaaatgctggtgaaatccaagagctactccttctggaatgcaacagtttgaagctactaataatctttagtataagaaatgcacttagtgagttgagtaactaagacaaataatgcatgctttaatgaacttaaggctgaatgtccacatgggcctcctgcgggaaacttgtctttttggtctgccctcttggctcagatgtccaaggtccaaggctgtcagcatccactgccgctgaagtgacctccagaggaccctcccaaggacaggatgcctcccaagccaggctgattcagctcagccttgggactgcaccagaaacacattaaaacagcacagtgttctgactaagaccctctcaatgaagggaacccttgatggtgggataatgctttgtttaaaaaaaaattaaacgtcaacagtgaataattacattcaagtcacaaaatgaacagagtgttaacaatgctgataaatgactataaatggtgtcaataattacacctagttatactgggacatttgcatgaacgtggatcagaagggggaatagggctgaatgagtcatttgattttccatggacttgtgtgtgtgtctgtctgtgtgtgtgtgtatgtgtggtgtgtgcaattttctattttattcacccaaatgcagatgaattaaaaggttcagttaaacaacagtgactgaaattggccttatacatctgccaccatctgtttgctagacacgagacctagaaatacagcctggagggaagggttttgtctttttcagactgtctctgggctgagggattcaagggtcctgccccattgcaggcttaaagagctgtgtgattccttaaaattcacatggccaaattctccatattgcatatgaagaaactaaggccagggttagttgtgtccaagacagaacgaaaatgcagttctccttgctctcaatccagcggtcttttcgtcagagcaattagcaatcagtatttatttcgtgagtcttgtctgcagaaagctagaaagtacttagaaaattgtgccctactatcggatgaaagctggaaaactgccaccttttctgctcaaaacgaaggcttttgtgtcatttgctgtttctaaaatttagctttcggacctccctaaagggaagagctgagaaggaacctgtaagtcctgagaagtcgtggaaaccactaagttcagtaaccgtggaaacctgcttgctcagagacagggacaaaggggcagcctctctacgagagggaagtagaggcagacttgatgcaaaagcagcagcttcaagtacatgcctgggaaggtcccttcatgctgagcttcgatgtgtcaactaacaggaagacataaaaatctggaaatgtaaagtcctgggacatttcaggactttctggtccaatgacatgttaagtgggaaatgctgtgccccattgcttagactctaaggtttagcacctccccgttggctttagaagctcatctcaggatcaaaacatacagagacttagactcttggtgctcaaagaccaggggtgttttactgagaggaatgcatcacacagaaatgctggtctcagacacacagcttctctgagacctgtttttggactaccaccagggcatgccagagctcctgtcaaggagctctgaatcaaggtcaaatgtcaacattgccaagaaagtaaacaggaaacctatcaatgaatagtctttttctacctgttgtgtaaaagaagctaaaaaaagaaacccacaaaagttgttacttttccttctagttatcaggcatggttctgagcaagaaaagtctcaaaacagtcaatatctggcagccactcacacaggtgaagtattgcctgcattctgaaaagtgccattctggaagtgtaatgaatgatattctccattttaagacctataaaataagttttcttatagctcaaaaaaaatcaaagaaaactgtcagtagatattttaatgtaaggggatcaaagatctaagattttcctacataggaggcaccttccagccctctggtccatggtcccacgtggcatagctctctcactaaattgtcatctgccaggaattgcctggcacgtaaccctggtcttcccccaaacagggcatgttcatctaatgaaaggagttgggctaaaggcacagcctggggcagctgggcaggagctccaggggtgactccaagcatttgcttcccttttcccttttctgttgaatgtagggcacttcctacctgatactgctacatctttcttcatattcaaagactgctgatttctttaaagggaatataaaaaactttgtatctttttttatcattatcttaatatgtaaaaagtaaaattacggaatagcttcttagtcaaatgaatttgttcactggccactttcctattatttctgaatatttctaagaaataaacttttttttttttttttttttgagacagagttttgctcttgtcgcctaggctggagtgcaatggtgcgatcctggctcactgcaacctccgcctgctgggttcaagcaattctcctgcctcagcctcctgagtagctgggattacaggcatgtaacaccacacccagctaatttttgtatttttagtagagatgggatttcgccatgctggccaggctggtctcgaactcctgacctcaggtgattcacctgccttggcctcccaaagtgctgggattacaggcgtgagccactgtgcctggccagcaataaacttttaattagaaggaaagaggcaaagagaggacagtcatgttattttcagtggtaataatttcagttttccatcttacttcctatcagggaggctcctggggcctgaaaacgtacttcagatattagtgcggataaacactcaagggagatcgctcagtccaacacatgcattttcgatgggtacaatatcacccaagggagcaaaaactggtggaactggggagtgtgtgtattattgtataactttttatgtataaatctgtataattttatgtataaagcacagatatacatacaatacacaaacagaggagatacacagtatgtctgcggtattacgatttcataggggccccctcacacccattgggatggctactatcaaaaacgcagaaaacaacgcatgctggtgaggacgtggagcaactgggaccctgtgcgctgtggcaggaatgtaaagggtgtggccactgtggaaaacagcatggaggtttctcaaataactaaaaatagaattaccacatgatcccacaattctacttctgggtgtacctccagaacaattaaaagcaggctctcaaagaaatattttcacacccatgttcatagcagcattgttcacaatagctgaggtgtggacaaaacctaagtgtccagtgacagaggaatggagaaacaaaacgtggcacctatgcacaatgaaatattatttggccctaagtaggaaagaaatcctatcacatgctataatatagatgaaccctgaggacattatgctgagtgaaacaggccagtgacaaaaggaaaaatactgtatgattccacttacatgaggtgtctacgggggtcaaattcacagggacagaaagtagaatggggggtcaccagaggctggcaggagggatgtggagtcagtgtttaacagggacagagtttgagtttgggaaaataaaaaagttcaggagacggatggcggtgatggtaaaacaacactgcaaatgtacttaatgccactacactgtgcactgaaaaattattaagatggtaaatgttatgttatgtccattttaccaaaattaaaaataacttttaaaaaaattcatagggggccgggcgcggtggctcacgcctgtaatcccagcactttgggaggccgaggcgggtggatcatgaggtcaggagatcgagaccatcctggctaacaaggtgaaaccccgtctctactaaaaatacaaaaaattagccgggcgcggtggcgggcgcctgtagtcccagctactcgggaggctgaggcaggagaatggcgtgaaccccgggaagcggagcttgcagtgagccgagattgcgccactgcagtccgcagtccggcctgggtgacagagcgagactccgtctcaaaaaaaaaaaaaaaaattcataggggcagggatgattcagaaaacaatgtcttaaaaggctccttggggaagctgttactttttaaaaagaaagattgagcaacactgttccaacgcttgctgaagaatcgagtggcatcaccttgctcacaggaggaaaggcaaccaccacagtgagtcaggcaaaatataaattatctctgcaagcctggcattatctcaccatggttttgcaccacaattttaaaagagaatagctgactcttttttctttttgagacaggttctcactctgttgctcaggcaggagtgcagtggtgtggtctcagttcactacagcctcaacatcccaggcttaagtgatcctcccacctcagcctccctcgtagctgggaccacaggctcacaccaccacgcccagctaacttttgtattttttgtggagatgaagtctcgtcatcttgcccaggctggtcttgaactcctgagctcaagcaaccctctcgcctcggcttcccaaagtgttgggattacgggcatgagccactgtgcccagccaactgacttttatgtcaaataatttttatggtagatttccattacaaaactcgaatatcacaaataataagctaaatggcaatggattcaacgttttggagaaaaatagaaaacatatgcttgtccagactagagacttttcctcttcaattttgcatttgttcctacagatgctcgactcacctactaataaatggtcttatgttttcccccgtgatgggtgccattgacatgggcatgggctcaggggtggacagccagtacgagtagtcatttcgtgatgcaaagttgcacacgttgttaatattgcagaacaggaagggcattgtgctgaacttgcgcaggcagctgccggccgtgcctagacaaggaagaagacaatgtgagatgtttcctttataattcacaatctatctctatgtaaagtggatttcagctggacaacaagcaaaaacatataatcaacataatcactgaaatggaaatgtataaaggattatgtaggacatttttgatgaaaggaaacaaaaccagtttaccagcacaaagaaaccttttcctaaagctgaattctagaaggaacttaacacatggttcgttatacgatggatagtaacaaattgggcaatgtctttcacaacagttttgcagaaaatgcagatgctctttctatagcagcttgctgattctaaccctgataaaagttaaaggcagagaaaattaaaacacagtttggtggaggatatctgggtcagattaagataatgaggacagatatgtagctttctgctgatctaaactagaggagcagagctcagcagctgtagagaatttcagacaggataacatggacctttttttttacaaagagcaatggttaagccgcatcaatgcaaattgttaagtgcactccaggaatcttgatcctacttgataatttgaagatgagatctaaagttttattaatttaaagattttcgaagattcagtctccacatttcttggcttgccattagtaatacagcagctgttgaaccgattatttgtaatcaatggagggaaatggggccgggctgctttttcactggctaccgccctcatggcgcagtgtttcactcgctactgccctcactgcagcagcagaggcgagtccagcactgcacaccgaaggcactcaacacacctacactgaatgaatgcatggatctgcaggcttcttacccaagtcctggccatgggcccgttcattgccttgcacgtagagcaaagagtacccgtggtaaagaattttggtcccagaaggacactgtgggtcatctattgtttgactatgcctggtcacaaggaagccgtgatcaacagatggggtgcctgggggccccatggatcctggcaacccatcggggcctggtggacctggaaatcctcttggacctggaagataggagacaaattagtttccctaattacaaacacgctcccctaaaggctttcaaaatcattttctccaaagagtttttaatattttatatttccacaaagtatcctacctattcatgttaccaaaaaagtctaaaaagaatgcatggctaactaaatacagcagcctacctccttcatggtgtcttaactttttctttttacctgccacctcaagatatttttataagcacagttctcggtgcagagcagatgcttgaacaatttagttcaatgaatatatgacacatatgaaaatggatatatgaataaatgaaaataaatgaatgacgtgactctgtgcatgtcattcacacggaatcgtggggctcctgttggggaggactatcatagaattattaaacaacctcatcttaaggtgtttcttcctccatagcagcccaaagcctgcgtatggaaatggagcagtaagggacctcgcaggcaaggcctgcttctgtcccctctctaactgtgccacgtgccaaactgtgcccaggtctgctgggctgagctctttgttcaattagtcagtggcctcagccttttgcatcatagccttcaccggacactcgagtgtgccttctcctaaggaagcagatcaagttcatcccatgcctttgggccaatgctggcattattttcatttctacttcccttgtcctttgctgaaatagaattttcacagctgcagctcacatcccacttaggaaaccacatgggccaccactattggctgcctttcaacaacatctgggaaacgtacactttgatcaatatctgtctctacacagaaaaaagaacacttcttcagctcttctatttgattctatttcttctaagaaacagacttcttcggaaatctgtcaagtgatatatccaacttcattctgctgtttccccatgcctggttctgctccttctatcccaaagatcctggtcaagggtaattacgttggaagtttcgcaacctaccagtaggcccggcaggtcccatctctcctttctggccaggggcaccgtcaaacccaggaatacctggaggtccaggtatacccaccaatcctgtaacacctgaggcagaggaaaaataatttatgatcctgtatggcagtaagctgtatctctttcttcccttcttaaatgtccttttcagtgttcaaggagccaagcataaagtctcactgcagatgagaacgttttctcggacagccaggagttgcttcccacaaagtcgagtacagactttgcagaagcagctggatattcataagggggtgtgtgtttgggcacctcgttctgagttctccctggtttcttgctgtttggcagattggtttggaaaaggcaggtgatgtggagggaatgagagactggataactttccctctcagccatatactggggtctcaatttttaggcaacagatataccaacatggatagtttttttgttttcatgtacatagcttgttcttcttctttctttctctctctcttttttttttttttttttttttgagacagggtctcgctctgtcacccaggctggagtgcagtggtgtgaccaccgctcactgcagcctcgacctcccgggctcaagcgattctcctacctcagcctctcgagtagctgggactacaggtatgcactaccacacctggctaattttatcattattattttgtagagacagactctccctatgttgcccaggctggtcttgaactcctgggctcaagtgatcctcccacctcagcctcccaaaaagccggcattacataggtgtgacccagtgagcctggctagcttattcttaagtatcattaaattttctttgatgctttcaactttaaaatgttttcattctcctttacttcccacccactccttatcagtagctcttcaaataggagatgtttcactcaaataagcagaagactatgttagggtttcaggaaataacagagaattgtacagacagtgccaatcaggcagcgctcctgggggcatggatggagagcaccgatttttaccattccagattgctacatgccacccccatctggagcgggaggcaggagggggaaaggtaatgatctggttctttgagcccatgtttttctaactgaacacagatgtgttgttatgtgttcctctagcttttcctgggttttcttctggattttttttaggtccctttaaaaatgtcataggttttgatatgcattgaagggaggtaagaaactcatattcatatgtgtgtgtataatcattacccagaaacttattttagatacatgggtgaggaggaactctgaccactgcccctctgggctccccataccgccctgcacaggccaagccttctcaccttgctggcctttcgggcctggcagtccctgaagccctttcagccctggggggccctcaggaccagggagcccgggctcccctttgatgatgtcgtaaggacctggggggccaggaggacccgggagacctgtgggaatagggaaggcattgatcaatttcactgtccacatactggggcggaaacaactttagaaggagaatcccgggtgaagctatccaaatggaacgtacttctcaaaggtaaagtcattatcaaaacccaggtaatcagatcttcacaaaacatgtccaatctgcacatctttattatttaacctgaaatcctgaactctcgggcaaaggcattggggcatcagcgtaacttcccactgcattctgggctctgggacccctgacaactgccctgcagcctcatgccagccctcccagcagggagagaagcttgttcttcccaagcagcccccgcttctgacgtggagagtgccactctgcgattaggacatttttcccacactcatctgaaacctgccttactgtatagtatcacactggtcctgatctttgagtgacgaatgaacttaatccttcttctgcatggcaagtcttggcatgtggtaagaaccacacaaagtgcgagttcccctcagcctccccgttttcagcccaataccctcaactctccctccccttccacataccctccctccccttccacacaccctccctcaccttccacacaccctccctcccctctccttccttgggttccacttctcagggcatgtggtttctcattctctctcccaaaacatggtttggaaaattaaatgatgccctagaagtatggtctgctgtaaagaggaagcaggatgaatactgtgcttaaaccattcccttttgagatgatgtggttttcggcgactttcatgctgtaggctcccaccggtggagaagccaacagcacctttcccaggaagaattctttactgtgcagcaggaatgcactccgtctctaagtgcaagattgattttctttcctattataactttcagtggttgatttcaggctaacttgagagccttgggaagtttctgaattctgagcctgtcagtgagaacctcggccacccctcccctggagttccctcagtcctggatttatcagattctactttcagacaagtcgctggttaaaatgtcaactacaggaatcttgacttgctgcaaagaattccctatcaattgtttttaatgatttttgagtcatttcacatatgaaaaaccaaacaccccaattctgtgcattcctggcttttacattttcacaaagcaccagtaaggtgtccacagatcaacaaactctcctacctttagctcccgggacgccttgatcgccttgatcacctttaattccctggaggccaggaagaccttttggacctaaaagcagagggaaagcactgtcttgcacagaattcccaatgatatacaaatatgtgtgtgtatatatctctctctagtgcacacacatacatgtacacaaatgtatagataaatgcatatacacacacatatactcatatatgcatacccatatatacacattcatacacctgcttatgcatgcatacatatacacatacatatacacacatatatgcatatatacacatatatgcacacatagacagtgaacaaatttccaatttatcttcaaggaagaaaacagcattatttctggtcacgtgtgtaaaacttttaatgaaactcttttttctagaacccagaagctacatttttataagcatgcagccaactgtaaaatgatccaactagtggaggggcatagggcactgtttttggtcccgatctgattcacacatgtccccagttggaccacaagacaccttgaggctgcgacctgttttattcacctttcacgtgtatctgactcagcagtaaaaactgcagtgcctggggagctggtaagcagcccaaaaatgtgtgtttaatatatgaataaattaatgaatagcccaaatccatgacttcttattgagatattaatgatccactgattcttaataagaaaatcagaatgtctttacactggcatccataagattatacaaattgggctgccacacagaaatgccatttttaatttgaagagaacagtatctcgtgctataatggcagcggtgctatcagtgctaaggtgcccgaggttagcaagctcttcacacagcgtctgctgctgcaaaggctgtgcagcaaggtctgtgctgtcttaccttgaaatcctggaactcctggaggccccatatcacccttagagcctgtgattcctggagagccaccaataccctagacacgcaaagaggaggttgggaattgctcaggatatgtaggttaagtctctccagtaacctgctagttggaaaatggaaacagcccctcaatgttctggaaagcacatttgtgaacaaatggtgccttgtggtttcttaaatgacagaataacaacacctttgcatgtgcctcaatcgggaagctggaaagtagaagcatttgtttccctcccatgtatctcctctgcttgtccatccacaggggaagcgcctgaggagcaggcaaatgtcctgcccttgccacctccagctcacagcacgatgccatagacagagccagggccccctcaacacctgtgacggcaacatagccatccagcaccagccaacgagcttttctgaaaactttccccttaatcctcaagtgcaatcagttttctttagaattagtttcatgtcttatctgaaaactgattttaaatatgcaaagaaaattaagaaatgctaaggaacgagtattttcctttatactgtggcaatattcgtgtattttaaaataggggctcattttctttccatttcaacaagtcgttcctttctcaagtcgtggacagcaacatgtaacaagttgttttatttcttacgtagatttgtttcttagccttattttaaaagtgtcaaaccaaaataacatgaacaaatatatatgtatataaacatatatacaaacacatatttatacataagtatgtatacagagacagacagacactgactggcaccaggaatggggtgtatttctttttcttcctcttttttttttgagacagagtctcgctctgtcatccaggctggagtgcagtggcaccatctcggctcacttcaatctctgcctcctaggttcaagcaattctcctgcttcagccttccaagtggctgggattacaggcatgagccaccatgctaacttgtgcatttttagtagagacagggttttgccatgttggccaggctggtctcgaactccccacctcaggtgatctgcccacctcggcctcccaaagtgctaggattacaggcgtgagctaccaggcccagccgggaatggggtatatttctatgttactgaggaataaaaatgagaatacataaatatttgacaaattacctaggcttacattactggaaaactgcaatatagcaataggggcccaaaaatacattcacatacacatttgctatactgtggagatatacacagctttgaggacaaggaatgggtaaacatgactgttgctactccttatagccagttctgcataattatttataagcatttcataacttactgattcagaagtaaatcagcaccacgtattgttttgcacccagcaagcttagctattctgtatccatccttgagaaagtagtctgatgactctaagatatgtctctgctgctgatgagcagttcaaagctttccctttaagggagaacatgtgttgacttacagaagaaccccgcttgctccaacataactgcagaggtctgtctcaaatccctcctattcatgatctcccctgatatactctctctttctcctaacgtgtgttagagagagacagagagacagacagatggagacagatagaggaaacagagagacagacacagagaataaagctctgctaatccagctatttgaatgagcgagccacgtaaacacaatcctttagccatggacatggttaagctaaaaatcaaaccaaagatccatgaccaccactaagaagggctatatattcaggtgcagcaaagagccaaagtcacacacacacacacagaaatacacaaggctgctggtcacttattgcaccctgagatgtgctcttctgaaggcttgtctaagtcaccacttagactctgtatctggatcaggtcagtaaagaaagatggaatattgctggttatcttttatgacttgaactgttcaactgcaattccctgtcctcctgccagtcctaagagatggctgggctagttttacagaattgttctctgcaaaacaacattggcttgctttttacattgagtttgtaaataggtcttaaatttaggcattgagccataatttccagcagtataacatttcccttttatggttcttggaaaactggattgtaaaaaaatgttacaatagtttcctactctgatgccaataaagatgtgggttactggcaagaaagaaagaaagaactgatttagtggggatgtgggagtgtaacacacacacacacacacacacacacacatatatatacatacacaaaatacatacacacatagacacatatgaatacttctggccagaaaagactcctttaaaaataaaaatctacaaatcaataactcacaggcatgccctggaatccagggtctcccttgggccctgggacaccgggtgctcctggccagcctggatttcctttgtcacctttaactccatcaatcccaggaagccctggaggccccatgggtcccggaagtcctaatggaagagaagaaagccacacatttggggttaaatatgcacaagtgtccctgggctgtggggctatcaatactgccacccacggcccctcactgatacaacactggaccaacagtgacaacccttgagacagaaatcgaggcaggtccaggaaggaaggaaggagggagggagggagggaatagaaacactactatctctgataaaacactggaccgacaatgtgaacccttgagacagaaattgaggaaggtctgggaaggaaggaagggagggaaggagggaggaaggaggggagggaggaggggaggggaggggaaggagggagggagagaggaagggaggaaagaaggaaggaaggaaggaaggaaggaaggaaggaaggacagacatagaaatgccactgtctccgtgtccaaaatggcctgcggtcagtggtgcccgggcatctgtgctaccactacgggggtcttcaccagaacccacaagtgggcccaagtgctgcgctggtttaagtccaacgccaccgacggggcacgagtccaggcttgtccaatcatttcctttcttgcatctccctaattacttaaattccttgacagaaaggatacaagaaaagctttgactcgatgggggccaaacacaatttcaagctgtaataaatgctgcagacttctaaataaaaaagcccaattgagaatttaactatttcttttacgctatttccttttgtgaattctgtcccagtcctcagccctggcccctggcgagatgcccttacctggcaggccaggctggccctgaggtccgcggtctcctttgggcccctccgtggcatggcctggggatcccggtaaccccggctgtccctggggccccggaggacccatgaatccttgctctcctttggatccaggaattcctgggctcccggctaatcctgggaaacccacctcaccctttgaacctgaacaagaaaaacagtttgaggtgatgggaaacgcagcagcagaacagtaatctccagcgtggacggcagagatgggatgaggcgtgcctcatcctgtaggtaccgctcagagggagcttccagggacaccacaggaaactgcagcaagggctccgatccctccttctctttaataacacactagaatccgaccatggcctggctggaaaaagagctcagaatgctaggaacccagctatcgttttcatacttctcacgagacgtgttctatggcaaaggcatctgaattgtgtttaaagacatctgcagcaactgcactgctaaacgaaagcctcactccatcagcacatgaatgggctggacaagccaatcatgttatatccatgcagtgggacactactcagccatagaaagaagtgagcaaccactgggctggatctcaaacgaattatgtcgtgggagagtagtcaggctgaaaagactacgaagtgtatggttttatttttgtaaactgctggaaaatgcaaactaacctagaggaccagaaggcagatggacggttgcttggggaatggggagagggcaggagggggggattatgaagccacggaggagacttttgggggaaggctttgcctgctatctagaatgtggggatgttttcatggtgtagacctatgtcagccttatcaaattgtccactttaaatatttgtagtttatgacctgtcagtgaaacttcaatagagcaggtttaaaaaattaaaaagtaacagcttgtaggaaaaagaaattctatgtttagttttaaacatagtatccaaatcttaccaataaaaatgccaaaattctaaggttatttccaaaacaaaggaaaagggaatgaaatagggtcaagacctaaagtggtcatttgggattctcttctcctggggattctccctgctatttcacacagcaatgagtggaaaacgcaaggtgctgcgtagagtttgtgcaagggcagtgcagcatgtccaaaggagtgtgcgggatcacatggcaaggtaggaaaggcagggcaggaacagcccacagcgaccccttgagcaggtgcatttgcaaggggctctgtgtttgagggattctgtgagttaagggagagggaagtgtccattcccaaggcagcccacccggcaccaggccatccttctcaacccaggggttcccagtgtcagactacatgcctgccaaggaaacactctgggctggtctcggggagaaccagggggtgggagaaacaacacctccgtgcccctgctccttctcagctgaagtccaaggccttccagggctttctgaatcctcccactgagtgggatcactcagccagcccagccacgggccataagcatgcccatggatgctgtgtgtgagctcctggctgcggccacctgtggcttctcttcagtgtcgtgcagctcacatgccttgtattttctgtgtcccctttgctttcccatgaaatgctcagctctctgagagaagagactgccttcccaagctcctggccaactctcagctgcacttagtactgagcacatcgtggctgcgcagggcatgtttttgtctcgtggtgtgtgctacatactgtcctgcattcacataagtataaccagttctagaaagtcagaatttcaatattctgatgaccttctaggcataaaaatgacaggggtctcgcctctctgctggatttttacaaaattagtccaagtaaaagataattctgatcatgagtgtactgcacgccattttgatccattaattagaagggaaccacatgtgtcttgcaggcattgccctctgggctcagcacccatcctccatcccgttgctgcctggccaacaggcatggggcttcatcctgaagacactgccccttgttctgctaatcaggcagcagcggttggttgaaaaggaagagcacagtgagcaaagattacctttgtctcctttggcccctggaaaccctgggaatcctcttcctggtagacctataagatgagggtaaaatgccacgtttctctttacttaaacaatccatctgcaggtacaacacaaagcactatcaactctgcaataatactacgtatattgtggagtacatagatattagttaattgcacccttgtaataaaatgatattcctacagttataagatacccttgactgaatgttcctaatttagtactttttcctaagtacctttcagctcagaaccaccacggcatttagcacaaatgatctgtgcaaatgagtatttgtttcctgctgccgtctggagataagcaaatgggattctcagacaaccatccactaattgctattctcagggaggtggggaaagccaaagagatttggggcagcagatgctggggagatgacaaacgtcagcaaagggcttgagggaagattcaaatcgggggaaaggagtgcaggggtatttttatgaattgtttgtatagaaaaacaaatgtatagaatataaagttatggaatgaaaaaaatgaaaagaaagccagcaccaatagctgtggatgctcttggtggtcctcccagtgtccccccaagtcaggggtaacctgcttcaaatggtgtgtttatctctctcttgcattaaatacaaatattactgtgtatgtgattgtcatcatcacacctgcacttttgtccaagttatggccaagttaaagcccaccagtgacaggagcagactcaggggccaaccaatatttccaaccatttcccctcaaatggggaaatgctgggcaaagaaaagagttttgttttgctttgctttgttttgtcatagcaaccacaagggaaatggaaagtgttctaacagcaggtattttatgtgtctctgactcaccactgagagctcaggttatttcaggggaagatgccctcagtatttatgggataataaataccccttcccttcttcccctccactcatcccactctactccacacatccacatcagtgtttaagtagttgcagggatgtgcagtctaggggccattctgtgcccagctttattcactgaacacaggcagtctgcaggtctctgggagtggacactgctgattctgatagggaatggggcgttgggccatacctggttcacccttctctcctgctgaccccgggattccatcactgcctggctcccctttctggccagctgggcctgtggggccaggagtcccaggaagacctcaaagagaaaagtcacatcagacacccgcataacctctcacagcaccctagctgccatacaaaatggccctttgctgacatcctttaagggagctgttccctcccaagcacacctggttttcctgaggtcagttctgacttcccttcagaaaggaccctgcgtgctttcagcaacaccaccaaaccctgaccctcaaaagctggtgacaaaaactccatgatggccacaaaaacagtttggagatttaggtcctagatcctgctagtgacaagacctcagaaagatcctgtaacctgcactagactcagtttgcccatctgaagatgggagacaggacagctggcctccctgctccccgtctgtgatgggaactccttggggcctcccatcccctggccactgttctctatgtgcccgggctgtgtcccaaagagggccctctacctgcttctcctttgacaccagggatgccatccaatcctgggaggcctttgtcacctttttctccaggtagcccaggacttcctaaagaaaaaaacaaaacaccagaacatccataagtttgggcttttctttgatttcttagattccccaagtccaagagaagcccccctcacctacctggatagccaacactcccgggagaccctttaaggcctggggaccctggcattcctgggatcccaatgcttcctttttctcccttctctccagggcttcctgggaaacccgctatcccttgatctccctgcaagtaaaagtcaggcatattaactttacatttgtccatgggcatgcatctgtaggcatgttatagataatggtatacattttggtgcaatgaatattgcattgcaaaactccatttccagatttctcatcaaagaatcaaagtccacttctgaatggagaggaaaacttaagagcagtagagccaaccatctggtttctacctgccattcctcttcgtcctccatcctctctgttttatcccactgacagctgtctcccaccttagcctctcaccagtctctagattcttccttgggggagaggtagtgaatacaaggggaaggagaggcgacttgtgctgccttatgggactccctgtgtgttatggctcattgagtgtgctgagatatttgctgagcatttctcaggcagcatctccactgagctgggagaaggggacctttccacgcagagcgctggttaccttttcacctcgcagccctgggatgcctatgccaggtgggcctgcctgccctttctctccttttgcacctttgtctccaggtaagccaggtgaaccttgtgggccagggatgccaggcacacctttctctccaggtgttcctataaacacaaacaattgaaacttgatttgggcttagctagtgctggtattacaaatgaaaaagtgcctccacagccagccaagaatgagatacaagaacgtgaatcccccacaaccagccaagattgagatacaagaatgcacatccctcatgtatcaatcggctcatgacccagaacacgtcagtcacccagatcacatcagagccacgctaggaaatgtctctcccgtcctttaagaccatcatgttataagacagggaagaaatacattaactacctagaatatttactttctcaacagaataaaaatggatcttatgttctttattatacagccagctctcatcagccagacgtcacagggactatgaggcgggcaggccggagtctgtgcacactcggttctgtgatgcatgctggtagccaggcttattcacacataggcatgaccagcaatctagatgcttatattttaattaaagtgataacagcacctggtcaagactcaagaggagatggaaagatgggcttcccatctgaactctccccctttctgagtgagctctgaggaccatcaccacccagcccttcccgcactctcctcctcttcccggctgctctcactacaatagacactgatggcaaagcattaaggctagtccgggattggagcagaggagtccggagaattcttctgaactaacacaaagggctctggagccataagctactcaggctgacaagcctggatggagaagccgtcgtctcttagggagatcctagacaaggggatggtcacttggagatcatcaaaagttgactgtatacagcccatgttttattccattagatggtgagttttcttagcaatggccattctgtcagccaaatgtcatccatccctgagcaggagaccattcagagctggggatgtgaattcatgtgaaagacacacgtgcctggattctgtccgtctcagctgaagaggatctcattctgcagacatgccctaccagtatcacacgcacacatgctaaagaatcctcttctaaatccagtttacctggcaagcccattccaccaacagatccttttggtcccggaagtcctggagcacctggggttccacttatacctggatcacctttaggtcctagaaccataaagaaagcagtctgacaggttgacatctacagaaagagctggggaacacaggcctcatcctgagcccttgccacactggggaccggagctccacactgtacctggctgcccaggctgtcctgcctgcccgtcctttccaggcactcctggggtcccagggtctcctcgggatcccttctcaccaattggtccaatttgtcctacacatcagagaagaaaatagcaatgacccgcatttgcttgcaagcaagttgctgcagaaacgcaggttggtttggttattatttatggaggacccgataacccaggaaaggcacattgtggttccgagcttggccatgagaagcctcctggacttgcctttctctccttggtctcctttctggcccttcatgctgcccatgtccaccttatccatggagccaggcttgccagggagaccgacatcccccttatcacctttcaagccagggtctcccctgggtcctgaggagcccggaaagccatggtcccctgcagaggaaagagaaggcactggtgagcctgggccagtgtcacagaggtgctcaaaaggctcacgttcttgttgacagggacagcagctggcaaaaaggctacaaagcactcataacttgtccaaaatggcattaatggccagtgtctgagacacagaagaatccaaccccaggtaaatgagcagtaaaaagccattttctacaattcattattcgctaataactctactgcatgtgacttggctttcaggtttagataacttacatttctctccttcctacatatctttatcactcttattcatagtgcccctcagttctatacaaaataatagaacaggaattttatcattctacaaaacaaatgaccttttcatgtgtcatatttacagtatttctttgtaaaagacattattttggaacaacttcaaataacgataagaaataaagacgaagccttgtaaacttgcgcaggttgttaatctgagcctaaggactcggtccctgtatcttggcatggctgaagattccaccatttctcacaagaagaatctcatctgtgccaagaaggaaagcccagcttctttctgatttgcttggccaagcacagtttcaaccccatgtgcattgagcaccaggaatcctactggaagaagggggtctcccagccttctgcttgatgttcctaacttcttttgtaggcgtcttaaagggaaatatgatctatgacaacttgagaatttcccaagtggcatcgagaaatagacacaaaatgagcttctagggttatcagctcccctacctttttcacccggtaatccaggagcacccactggtcctggtgagcccggctgcccgggggtccccatgacgcccatttctcccttggaacctgtggccaaaggaaaggactgtgaacattttcttgctctgaatgctgacagtaaatgctgagtcataaaaagaataaggtgaggcccatgtcttcatgatggatccaggcagaagttcaaaaatcacttacctggaaacccaggaatcccaggagccccctgctgtccaggaaggccagggagccccgactgtcccgttatgccagggagtccttgagcccctttatctcctttagggcccggcatgtccagtccagggaatccggggaaacccttctctccttttattccaggagggcctgcagttgggtgaaacacaaataacttttagcagaatttacagaatgatctacaatgtacagtgctctgtttaactatgactttctgcagaaagcccgtgagcacgcccacactgggaacttgaatggatcatctgttaggtgttggtgtttggggtcatcaggataatcaaatggctcttgttctaaaagaaaagcactcccctttcctgtcattgagagtcagcaaggccaccctaagcaccaccactgccttgtcgcagtacttaggactagggctagttttgctctaatttccatgcaccaccttaattctatgattattatgatcaaaggcaaagctaggttctagacatggactcaattagttgaaattatccaccactaattaaccgtcctatggaaagataatatagagacatcagttagaataaaatgtgaaacgtgacggagtacacaataaaggaaaggtctctttgtttggcacatcatctcagtgggtgggagaagaatctgggactacatttaagcaaacaatcaaacctattttcacaaactcgagttttatttttttctctttttatctcatacattgtgctaagcttcactttatagggaccccggcctcatcccccatgcttcagaaaagcatgcttttgggaacagataattctagaagcatgtcactcacctgacaaccccggtggtccctgtcctccagggggacccctagctccaggggggcctattcctggaactcctggagaccccacggagcctggcaatccaggaggtcccggttcacctggagaagaaaaattgagagtaagctgtacaggagcagtggcacgtctcccggcctaggagacccatgcacacgaatggccccagcaacggaaagccacgagctctaggcctctaagatttgcatcgttcgttcaacaaatacatatcaaatatactcggtaggggctctgggaatgcaaaaataagcacatcctgtcctcgaaaccctccagactgatctgcatgaagttacctctgatcccctgaagcccagggggtccgatcgctccatgttctccaggaacgcctggtaccccaatgctccccttctccccgggtgtgccaggaatgccgggaagacctggcaaacctttgagtcccggtagaccaactccaggctctccctgaaaatccccaaagcacagagaagcaaattgatttgcaaagtcagtatttttatcaaaccaatagcgtaagtgaagacttaacagatactgccaatgcatttagtaagaatattatctgctcaacccttttcaagcgtttgcaaagcttcctcatacctattatatcttttcaatctcaccacaagccccataggtgggtaactttcattgttttcattttacaaaggaggaaaagcaaggctccccacggataaatgacatttttctcaagtcttctgacctgagcttgtcccctcaactctgcagcctggtgcctgtgacaaagcactggccctgagtaaccggtaaaatgccaaatatgatttgtgagtagttaatggagttcttcctaagagatggcaaggttccagggctagcatggacaccagttatttagttttttggattaatgaaggtttcacagtaaattaagcattttaaactatggcatgagtcactgggctttgatagatacagatgattaaaataaagggtgaaggtgccttggaaacagcctggatttaggcatagatgtgaggctccaaagcaagcaggtggccatgaaatcacagggctccaccggtgtcccctgtctgcaaatgatatttccagagagggaggatttggacattagtgggcagtggtaacttccctatttgtcccagaaggaaattctcaaaatggaacaaactccatcaaggggatgcttgaaaaagcatggtatttttaatcataaattaaatctttcattcccattccattaggcatttactaactcctgagtcttgcactaagtttaagatgatccgcaagttgccgcggttgactaaatgttcaaatgcaacgtaggttatcaggggaagctggtggcgggttgtacaaagacaaaggtccaaaggtttctcttctgcctcagccaccagaggagggcaccctgctgtcaggtatttctccggaagaaacccccctgggatcccagaggcacggcccctgtggtgcccatctgccctctcctgagggccagggagcaggccccacctgggtccatcactggcaacgtttatcgatggccgttggccctttctcccgtttggtaccaatgccttctggcaatttcacattggttccttacaatcaggacaggaaaggatctaatcggtagtcgctcacatttgctgagcagaatttcaagtataggcaagttggtagcagaatatttgagggcaaggagaatcctgacttcaccctgtaccaacagttctcaagccggggcaatctgatcgccctagtgacatttgccaatgtctggagagattttcagttgtgactgggtggaagggggatgctcttttggtgacccataggtggagggagggctgctcctgtcaaaagccctacaaaggcacagggtggccccccacagaaaagagctattgaacccagaatgccagtagtgctgaggctgagaaaccatcctgggtgactatgctttctttcaggacagtggctttcaaacagccttcatctgcttctcacagtaagaaacatattttaccctgagtttcagcttacacaggcaagaaaatgtctgtcataaaatttcataaaattgaaacaaatgtttcataaaatcaaaacaagtgtttcccttcaaaatacttacttccatgtgctacgttctctgatactttctattctatgttatttcatcaaaaacaaaaatctgctggcccaacatgtcctgggacgttcacaacctgcattttttccatccaactaataacaaggatgggggagaagggtcatggagggaatgcttggcactcaccttctggccctgcacacctgggttcccaggtaagccattaaatcccgggcgacctggagtccccggtggccccatgtctccaggtaagccgtcaacacctgttttaaagagtcaaaaaaaaaaaacaaacaaacaatcattgcgattacaatgccgttccccactttcttcacttttagtcttgcccagagatgccgacctgatctgagaaggtcaactgtggaggccttccgaggtggctggaagaggccaggggagactgcccggcagaggggtcaggtgcgttgctgtctcttccagcacctctgccctcctctttctctctcctttccttttcttctgctctcttcaaacttttctttcccatcctactctccccaaacaaaacaaatataccccttggcgcctgcaggtgagaagggcactttattcatctactcaaggtgtggttgggggggcaggtcaccaccatcacttcattagaaatgcagaccccaggggtctataaggcaggcccacttttcaagatcccacaggatctgtcactgaaggacacctgcccactgtctgggccccgctctggaagctctgatgggctatgaagctggccagccactagttcagaccctttgtatgcaacactgaggtctccgatgtccagtaatttgtaagtttgcagtggcacacacccgaatcacatcttctgtgaggctgctgcacagatagggtctgtcctcctcactgccacaaagccaagcaactccatgtcacatgggtcacggcctcaggtgaaggaggcactgtgtgaggcaatggtggaatgtgagggagttgtgagtgtgacgaggcctcagcgcctggccctcctgaacagggatgctctgctgcccgcccagcctgagggaagcagccgtggtgtgggtgggcgttgcgtggctgtcagaggaaaggggctgccgtctcctgttctccaagctagcagcctacagcagtgagggtggatggggcctggagcctctgggtaagaagcctgggagcctggaggagatttcaacctaagtgtggctgcgtggtgtgttgtacgaagacaaacttccttacacaacacgtcccttttgtgctcacagcaccttctcctcagtcctgaacagaaggtctgtgatgacaagtgtgttgatcaaggtctacctgagggacaagtagacctaagaaatgtgaaaagcagggggaaaagaaattccctcctcacctccttccagttttcagcaggaagtgacggctctaacaccggtaggactcctcccctcggagcaaaggcccctccctgcgactccttgcacctccccctgggcgctcccccaactcccaacccaccctggctgtgttcaggtggactgcgagtcttcctcacggataaaaagcaaacacctggagggtgggtttcagcgggcaccattggtggcagtgcccatgcagcttgcacagccttagcgtcccatcttcccaaccaaaccctacactgcaaggcagctattgcctagaagctcctgaaatcactgggctcagcactgcttgggctcttctgaaagcctccctgaacagcggtcaccagcttctgtggtgttttgatgtctaccacctcctcttttctcacagaagtcacaggtggaccaaaggctcgggtccgtctggcagggttacctttggggccggggggccctggaaatccaatgcctggctggcccacagcgcccttctctcctggcaggcctggccttcctggggttccgggaaagcctcggtctcctgtggtgagaaagaccaacagtcagcgtgagaaaaacgtgaggaaactctcgtggtatcccggtgagctggaattccaatcgtaccttggggacctgggaagcctggggaccccggcagtccttctgctccaggggggcctggtaaaggaacaatttttcctggttcaccctttggacctagaggaaaaaaagagcaaagacaaacgatgaaggaatgaggaccacacggaacacagggaggacacgcagtgggtgggctgcacgccacatcctacccagcaccacgagtgcccggagagcagagcctctgcctgtgttctccacttcttcccttggtgtttctaggatctttcacagagagctacgcttctccccatgcgtttgcatgtccaaaatgaccaagatgtttgttggacacaagaatcccttaagagtccacaattaagagtcacaagaagctgaaaaatctacaacaacaacatgtgaggtggctctaggtgatttcttagtgagccggtctcaaaaagtcaaaatacttttgctgttctctctcaatttaccaaagtctaagttgctttgagattgacctaaattacggtcgtttggtgggaaattatccaaacaacatgatccgcgggtgattacgaacgatccattatctgtaatggtgcagctggagagctctgcgctcacttgagcaacacaggcaaaaccatccttcctcccaagccaggaagcacagccccggccctctgggcactcatgcctaggagagccaccggagtgtcagggtttcgctgttaagaaaggaccaaaggcttcccctccaagaatgcacgcactgaatcttcgtacacctcgtaagagttcaagctatgtggggcctccctagaacagccagcacattctttagctacagactgtgggaaacgccaactgaacgaccctaggaaatgcctgctgttggtgacacacaccctgggcaccaggcttttatgattaccacagttacacacagctctggcagatcaaagacatctgttttctaatctcgaagctaattggctctggatggccaaggagccctacagctgtggggagagaggatcaacagccctgttccccctccccagaagccttcttccccatctgctagggtatatttgtgagtactccagttggtttctctgatggtagtttctcgccaaaagaaaagctaattcccttcgacagctctggaaatctgcagatgtcacaagcacaaagacagcacttgatttgttgattgtggaatcaagagacccaagggaaagtgatcggaagtccctatgcctggctcaccgaagtcctcctccatcaaacccggtatcccctacctctaatggagtcataaaagagacatttctgggacgcttctaaacaaagaacaaccatcaacagagtcagaacttgatgctaagtactcactgattataccaacagggagaaggataagagtaacagttatgttagcacactacacctgggcttccatcaaacactggctgacatttcccatactggaatgcttaggaactggactgtgtgtgtgtgtgtgtgtgtgttttgtttgtttgtttgtttgtttttgagacagtgtcttgctctgtcatccaggctggaacgcaatggcacgatctcagctcattgcaacctccgcctcctggattcaagcaattctcctgcctcagcctcccaagtagctgggattacagatgccagggtttcaccatgttggccaggcaggcctcgagctcctgacctcaggtgatctgcccaccttggcctcccaaagtgctgggattacaggcatgagccagcgtgcccagcctatacactgtatattaataaggaaatattagtccctaatgggaataggaattcataaaacaggctcaatatggttattgacataatcagcacacttgcgagccagaacggcatgctgtaattgctccaacgtggttattgttgggtatttcaaatatccagctactttatttatttatttatttatttatttttgagacggagtctcactctgtcacccaggctggagtgcagtggcgagatcttggctctctacaacctctgcctcccgggttcaagcgattctcctgcctcagcctccagagtagctgggactataggtgcctgccaccatgcccagctaacttttgtatttttagtagagatggggtttcaccatattggccaggctggtctccaatgtctgaccttgtgatctgccagcctctgcctcccaaagtgctgggattacaggcgtgagccaccgcacctggccccagctactttataaataactatgttttttaaggtttactagttagatatttttaatcaccttaagtcctttcactcacttttacaacttttgaatgtttcctagcaacgcgcatttacttccctcatctacacacaaggcattcctagcctctcctcttctcattccgggattttctagggaagaacaggcgtgctccatgtctactgggaatcgcagtcagataataaactattagcacctgctgtgtgcaaggcctagcgccacagccccctcccgctggccctgaaaataagcaagtcgtgggagaggagaacgacgagggagcccacactcatccctgctacaggttctctggaaaacctctgaacaggctgtgcaggagggcagggaccacgtctgtggttttgaccatgtgttgtcaatgctcagcatagagcttggcgcgtgattcactccaaaaacagcagacaactaaaaccaccatggaatgaaatcgtcatcgcgctgtaggacctctaaatccattcacaggcgtctgccgactgtgaagaggtggagatcacaccactcgggatgcacagaagccaaaatgggctgctcatcggggaaagccaaatgggtaaggagaggaaaatgacttgacctcggtgtgacttctatacaaaggctgactttagctggtgcgtgctgtgtacttacttatgaggactgtaaacccaagttctccacctgcatattacctggcccatcacatacatgaggaaagggaggcacaaaaggctgaaggcttgcccaggtcctgccccaattcctggaagaatcaaagccaagtgtgcgccctggcctatgcgaaccccaggcctctgtgtgcacccgaggtgcctgccctaacctccgtttacaacttcatgctgcatcacgagtttctcaggcctcacctggcaggcctggggatccagggcctccaggaaagcctgcttgtcctttgtcaccaatgggaccagcaggaccatatcctggaggcccaggggggccggtgtcaccacgactgcctgggaatccaactcctccaggggggccacgctctcctttcaatcctacagaaccctgatgtgagaagaagaaaaagacaccgttatcagagacacaccaacaccctgtccttatcgcattcttctgacatttgtggtcaataagtactagagttaactggctcacactatttatttacttcatctaccctcccaggagggccaccttgtagttaataagtgaaaccagcattcttctccctaagctgagcattcttcctccctcatctacttagggagatactttagagaatgagatgttgatacctggaatcttttgaaaacaatgacatgaatactattaactttagatttcacctcccatccaaagcaaaaagatacacaaacacatctgttcagttcccccaaatgcatcagaagacactgatctgttatcacctaattatttgtcaataataactggcaatgcctaggtttatagacttaagttgttccatgaaccatgaatcatgaaacaagttcatttgtgccatcatcaaggagatagaaatacatcaatatgattcaaattactcatttctcaatgctttgcagatccacactgtaaaatgcacattcaaagtctggagataaacataccggcgagcccttggggccaggaagacccggatggccatctcttccaggagaacccgctctccctgtcatgccgggctgtcctggaaagcctgggtctcctttgtcacctttgagccgcaagtcgaaataaaactcaccaggctcccccttggctcctggctggcctatcagccctggtgtaccttgagggccctgtaagaacaaagccttgtgatccacagaagaacccatccatgaagcacaccagtgtgactgtaacacaagcaaccatagaatcaagaagccaccttcttgaaaatggtcatgcattcatgcctcatcattgattttctagatgcaagccaggagctctgtgacaaagccctggtctgctgcacttcttgtgtttttcttaaaaacacttatcttaattagatatttcaagcaaagacctggatggggcagagggagttatagtgtggctttgggcacccagctctcctccaggagttttcttaccctaacaactgctcaacattcataggaacacacagcacctgtcagaaggttctgattgatgtgtggttcattgtgcagcttcagtaacagacagactcaaagaacaatcgctgtcctcagctctgcctgctgcctcagccccaccggcagcacgcagaagccttttctccagcttctgggcccactgagctacccgtcagcacctcctggccagtgctgaatactcctgtgcatattgaacaggcttccttttatgctcatgcccagaattccagaagagataaggacttccagggcaccagtgagagatgaaactctgggagtgggcactgggccagctctaaaatgagttatgttgagtcagcagagtcaaattgactttcccaagagactcacactagaacgttgctcagttcctggaaagttaaaactgcaaagaacacccatacccaccaatggcttctcctccagcatcctgagacttgggtttcacaagaaaaacagaaaatgtttccaacaattgtcccattgacttgttcacttaggcctgagaaaggcatcttcagactccctgtcgacttggcagaattttaactctggcacaattcacttaatgtgaattttttttcataaacttccttgcagaaggttcttagatatgtatgaatccctcacatgcacacgcttctgtgtgtacagatgctatgtgcttctcaaaggaagaagttggtcaaccaaggacagaccaacatttgcccaatctttagactgaaaatatggctagcattggttaccagcctgctaggcactatgacccattctatagcatctctgacccttattgcagctctgcaaggaaaacatggaaaccaggacatagcagaggaagaagctgatactcaaagaagtgagctgatagatccaagactactcagccagaaagtgctggaactgggatccacatttatgcatttccagctgcaaaacttgtaccttatgcctgtgcctctggagtgctaaggagagttagggatgagcgagtaaaatctgcccattacacagggggagaggtggggcttgaaggacttctgtgtcctgctcaaagtcaaacaaacagcaaatgtgggactaacctaaatggagcagacttgctttcctgcctgaattgcttcctaacagctgaaacatcgcaggctaaggaacgggagaagctgctctgcctcccattccatcttccataccaaccacgatgcactgactcctggcccaatcccatcaagcaggcttccagaagtatggagagagtcggcagcaactctctgcactgttcaatatgacttggaaagttaaattaaataacacaaaaaatgcagttcctccattacagtgactacatttgtttttgttttttgttttgttttgttttttgcttgttttgttttgttgagacagattttcgctcttgttgcccaggctggagtgcaatggcgccatctcggctcaccgcaacctccgcctctcaggttcaagagattctcctgcctcagccttccgagcagctgggattataggcatacgccaccacacccagttaattttgtatttttagtggagacggggtttctccatgttggtcaggccggtctcgaactcccgacctcaggtgatccgcccgcctcggcctcccaaagtgctgggatttcaggcgtgagccaccgtacccagcagtgactgcatttcaaagactcaacagccaccactggccagcagctgccagatcagatggcactgacgtagcacgctcctgtcatggcagaagcttctcatggacgactaccagtggtctgagctggccccgcactctaatgccccttatgacctgggacacttcacttggatctactcaggaaaggtggaacacacccagtctatttgctctgggtcccaggaaaggcaacaaattatttctatgagccacctgccagaaattgtagcagagagtcatggaaaatttgttatttacttgaaaggtgttttgggatttttaaactgtttctcttgagttaatattagctcctatgcatccttcaatcccagctaaaattagcctcctctatgcggcctttcttgtgggctcgggctgccttctggtcctcattctgtaaatcactttgcttcattaggacagtctatttgcagagctgtctctccactagtatttcagggctctgagggtaggaccaaggtttcctatctttgtatccttggcatccagaacaaaagagatactggaggaagtatacactgaactggcaatattcatccattaaaaaatactagtgtaagaaattataaccaatgtatatttttctcaacctgcaaacatcattatattattttatggtgattactcacagcctaaaaatataaagctccccaatactgtgatcttagggtgagaaaatataattttttattttaacaatgatgaccttgcctgccatcattctatttacgggagaaatctgggtttttaaaacagtgacattggtgaccctaggacatctcgtgtgctttctttgccacagaacttcttgattctaagtagttcaaaggtcttttgatccgtctccctgaaaataaatgctgaggattcaactactgcctggaaaatttagcattggctgcattaattggagaaaatctgacacctacgctgtctgcctctaaaaagtggtgccactgtggaaaaagtcagggagtgttggtttcaattcatcctcccagtgaccaggaaccatgaaacctgctcagaccaacctgggcatcatcaatccgctcggggagtcggccttttgtgattcattattctttccccaaaatcaaatacttgtctttcaaaaggaaatgtcacagaaatgctatctaagtcaaatgaaaaatcagagcatttcacattttaatctactctcctgtgtgctcgtttatggatatctcttttagcctctagccaaattcaaaataagagaaccacatttctgagcgagttaaatcacggagcttcaaatacagcttccaataaaaggaaaattactaacttctcaattgaattatttacccataaatttatttttagagactttttccaactccggaaagaaaggagctcctgatgaaggcataaggagtagaattggggttgtatgttttctttcttttcttctatattatgatctttcctcaatattccttctttctcacctctttcctctttttccgtcttttattagatatgtctagactgagtttcagccagagttgaggcaggaagtccaccaggaaagcccaggagatgaagcggtgcatagaggttaaaaacgtccttttctgcttccttcaaagttcttctgtctttgatccccactacagtcagggctacccagttatttgaacttctaatttatttagatatatcttaaacaattgcaacttctaactcagctccccaggcaccagggaagttctggagagcaaaagcccaagatctaacttcaaaagcagaaaatgattgctgaattccagctgggtcattgctatttcaactcgcttttgccctggttttcttttgtagaagcttccagcaatatctttaaaaattaaaaaatttgaagggctacatcagaaatgaataattctgaaatttgactttcaatatcttacaaaaagaaaaaaaggaatgaaaggaattgtggaaaccagtccatgctcgcaaagctcagaagaacaaagaaaatacgagaggaacaatgccttgagatttcaaaacttcagaaacagaagtcattatatgcaagaaaataatgtccttcaaaattcaagattattattatgctcttctatttagtggattcttttaaaacaaactacaaaagctaagaagctggtattttgttccattgaaaggtttcatgtcaatgtgatccggatatttcatttatggatttgaaaaagcaactgcacaatagatgttgtaacagaaattttcaactgtaagaagaagaataaaaacatatttctaatcctcagaggcaaacagatctgctttccttgatcttttcatagaaactattgatgctgaacctactgactaaccagcttttagatgatctgatatgatgttaccagcactggtaacacagaaagacggcacttcggctctgcactgtggctgtgtgggggtggctcctgtgacaccatttgtttccagaaatcccagagaccctgagggaaggacacactcccattcagccacacctgaacacaggtcggcagcagccgaaaaaatgttgaccaggtgagaagaaaggcagctgtgatttgggctctgtgggtaacagtcttgctcattctcctgagacaagggccgcatggagtcactccagagggctcgacacagcaacacttaccagctcccacacaaggcagaagccatgcttgcaaatgcaaaacgacacaactctgtccacgtgcttggtggcaacttctgatatgtacatgaactcagacaggtttacttactggcactcctgcaacaccatctctgccaggcaaacctctgtcgcccttggcccctggctgccctgggaaacctttcgtgagagagagggaaaaagacagcaacacagcattcatgagacacttctcaaaaccttttcttaagactcaaaagcataaaaatctgtataggaagtggatgattgcttggataatccaaagagagtaataactaaaatgcccaagacggactcagaaagggaataggtgacccgacgcacatgtacacccggaagcaggaatgcttccagcaccccacacctgcccccctgcccacacacccagggaccacttaaaggaaaaacatgaattccattaactgcttgtgagataacagaatctgtggcatggagggaactgttatgctgctgtcttttattaggaaatctttatgaggccatcttgatcattcccagcaatgtggacaaatcctggaagtggggcccaacattcttctgattatgctttaggattggctgccgaaaatcaggccttctatggagtgaaatccctttcacaggaaagatgccaacacaccaaagcaaactctgacctggtccttttcacatgtgggtcttacctatttctcccgggggtccctgtggcccgggaggcccccgatatccgtctatatcacagatgaggcaactctctcctttttgacctaaaaaagaaaacacaaaggtgcttacgtgtaacatgtgaccagaagtctccgcagtgcactgagagaacagaaaaaggcaaggctgtcactaacatattacatccaaacttaggtttgctcagtggcaatggctcctccagacagctctctgctaatgggtggaaactgcagtcaaacgcacgtccctgtctgtcaatgaacgggcccactgcccccagcacgcgtcacgtgtgaccacagacgcactgcttaaagatccaagttcttctcccagcgaaaagacagggctgcctcagtaaaaagtggtccagaaattcaactgtgcctatcagcctgaaaagacttgacttttgtaatttgtctgtaatgtgaaaactacccatcccctttctctttggttgagtgcttagtccagttcatggacttcactggttggtggacttgggaataagaagccacaaaagcaagaacacatatgtgatccaggacagaagaggagagagactgcagccctgaaaaaggagaggagatgctcttctttggaaattctaacatctgaagtcttgattttcaagccaagctcagagaccttacattgtcttagctattcctgtgtcttaaatattgaaatgtctggtttctaggcacaaatcaggcataatacagagcaaaaagtgctcgcagagaagcccatgccagggacatcgaggcggcgtggccatgttcttcccatccctgccctggctggcagccgcacacgggcactgctattgcccactctgccctgggatgcccctcagtcagaagtaaaacagggccagtgcaggtaggccatgcccccgaagtgtgggagcaggcacatggtttcatttcgagctctttcaggaggcagagcaggagcccatcagtggaaggggcacggtacaacacagctgagaacccagctaagttctgggcactggggcattcgtgggtgtgtctgttcgcaaggcttcaggtgggtggggagacaaggtgcattcccagcagacgatggagtcgaaagaggaatgggaagactcgagaagacagatgcttctcctaggatctgggggatggatagctaagattgcagtgtgaagaacctctggacgctggatctgtcataaaatggaagagcccatctcacaaagtactgagcgcctggtaactagagcagacagactcattaaaacccaaactgtacactgactcagatcagtggcacccctgtgatgacgcccaagatcgcttccatttcaggtcctgcagtgtatgtggctgtcagaattctaagatgctggctgaaacttttccatgcatcatttctgtcttacacatttgaagactaaaacatgtttacagttcacaggcagaaatggtacacagtggggttgatttgagggacagcctcctatttgtcctactctcgggttactaacaggcatataaatatcagaatatccattgcttattcccctctaaggcaggactgttgatgcagtgataatccacctctgtgtctaggatggcggaagagataaataagtgtcctgtgcgggtagtaaggcaaacacttggaaagattaaagatggaaccgagagcccagagtgaagctggttaatgcatcaacggtagatttgctcacactgatgatgcaaacaccactggaagaattggtgagcattccatgtgcagatttttgacttggcttgaaggagggaagagcattctttggtaacagaagtctcttctcaaacactgaatggaaagattgcggtaacaaatcagtctgagttttatctgctgaccacgcccactgtagcaagactgacttcacggtcctcggaaagggagaaggggcaaaactctgactttcagggctgtctccacctttcccacccagatcatcaactaagttccggaagatgcttattctaggaagagattgtgaagagggttccaaataaaaggaacctacgccctaactctgcccacccccacttggctccaaagccggtaagtatgtgggaaaaaatcatacgcaaagacacaaccaccattttaaaaaaatcaaaatttcttacctttctctccaatttcgcctataaatcctggctgccctggaattccaggaggaccctggtcacctggaggtccgggctgacattccacaattccatctgaaattgagttgtcagagttataggatcatagctaggtgtttttaccctctcctaactcaacctctattataaaaccaaaatattttaggctatttgacaagtgttagaaattcagctttagtttgtttcaaaatcatcttaggctatccaccacttgcaaaacataatcaccacacaccacccaccacccactcaccatcccaagccatcactgccaacatttctatttcacaaattctgaagtatctgtaggtgcatcagccctgtcctgtatactatttcatttcatcttgcgaagtgcctaccatcacccttattttacaaatgaagaaactgaggctcaagaaaggtaagtgatttgtccagggtcatgcatctagtcaaagctgagactagaaaaattttcttccttttttccccctctaacccaatttacagcaaaactaatcattattttagagctgcagactgcccacgaggaaatgcctcaaattgttcacattcaattctgagcatcatttatgtaaagaggcataaaaataaactgcagtaatgtacacaccatctgtcctaggttctagtaaaaaatatcagtattgtttattgttttatgatttggatacacactgagatggagtttatatttccttccccaagatccttgaagaaaaaagacacagtgaacaacttggtatccagcatccctgcccaggcataaccctaacactcatgcaccagcactgaaggccctcccctctcccttacagggtcttcacctaatgacaaagtcatgggcagtctctgttcagctgtcacctggacgccctgagtcccagactatagaagggccccagggtgtggagtggggctgtggggccctccctcgggcttgaatatattaaccaaggtcaactctccagctcgcccaccccagctagaaccagaatgcctaaaaagatcccacaccttgtttgatgacttggtttagagctcagcagaacaagttagcttccgctgtgtaggaactatgggggaggtgcttttgctttgcttgttgcttatgtgcttatgtgtctttccctgagtttctccccacaaagcacaggaggcaagaaagcccaagtggggtcaccatgggtcccccacagccactgctagggacctgctcctggtgactctggtcctgcctggctcctcgttagcccttcgacattggtgcagctggcaccatcgtcttaaacaaagtggactccatgtttatgcttcaaagagcagcccctaaattacttcactgaaagaacccacatctctcatccctgtgagcctagggtatactaattccttgactctagaaatgtatgctcaagaatattgagagacatgtaactgttatactccttttccagagcataactcctgcctgcttcagctcaaccagaatcccttcaaatccctgacaaaaaaacaaaaaacaaaaaacaaacaaacaaaaaaaaaatagtacatcctcaccaaagtccatttaaattcattttatgcagtgattatttctgaggagttctaaagtgcaaatctagagtttacattttacaacgccttctcatcaagggtatctgcagccacagatggtttagagctggctgtacccacttgagacaagaatgcagtggcagaacttacatgcacaaatggctgcattgtgtggttaatgctctatcgataagtcctgaggtagcaatggctttaagatgtagcctctttaacatacattataaatcttagtacaaatctcatttctaaattattactcgatactctgtgattgagaattacttaatttacgtggactaaaaaggccacctagaaaacctggaatagtaaatattacaatgtgctcagctaacacatcccattcaattaacaagagtgtaaagttcatatttttacatgacgtgtgtttatatttcatcacttgcaaaattacgaacatccaaaagaatgtccttttcccagatttccccaccattggctccctcacccccttcatgtctttgtaaatcactctgcttaaaaccacaatcccctgcccaccccccaccccagaaccctctgttgactctcctgcttaagtttatccctggacttatcatctcctgcattcatgagaattcccttgtcttgggtaacccctgtcagccccatggaatacttgctccaggacagcaggatctgttgagtcttgtcaccactgctagatctctgcctcccaggcactcccttccccgctgaatgaatctggaacccaaaggccccttggtcagagctcacaaccttctctcagacacacagagaaaaggagcctctggattgagtgtctccaggactgcaatattttatcttcatttcccatgtttcacacaatcacaagagcagaggagaaaagttccccaaagtcacacatgatctgttctttctcctacccaaattcatgtagatcacattccccatcgaagctgccaggctggaatccatggctccatctagtcctggcccagcccccaacagtggcctcatccatgagaactccctttcgtaaagatttgcttgaattctagcaaataaatcttgctgggacttgaagcctgtgaatcctttctcaatcaaccccacagaggattcgtgtttcaggggccccacagagcacacgttggttttgatccagcaggttccaaaggctggctccaggtatctgaacacactcccattgcacaggttggcttaaatccttggagattttcttcgaatttgctttggtattgtattgggaccacacggccatcttaattgagtcaagacttccatgttacatgttcaccttttctggaataaaagctggcttttctggactttactaatgtaatctttacccatgtaatcctgtcttccttgtttctggggtgtgtgtgtgtgtgtgtgtgtgtgtgtgtgtgtgtgtgtcctagtattcatttgtatctctagatgaagaagaatgcattctgttttcaataaaaattacataactcaacagttttgctttttaactttagatgccaggagtctcagaggtggttaacgtgttatttactccgttaaaccagctttattttgaaattttaactattgctttttgtagcatggttcattctctgaagattcccttagaggaatatggatgattagaagaatccacgcctttctattacactctggctgtgggggactatcacagcccccaacctgggtctgcccggcaccctggtgtctgcttgcaccccacattaaaccatttctgagggaactcacttgtgtagccaggctgcccagggggcccaggggaaccaggaggacccgggagcccatctcttccacttggtcctggcagagatgtaccaggaaatcctcggtcacctttttctcctctttcaccagggaagccaggggcaccagcctgcccaggtacagggaggcctgcaaccagacagaagctcacatcagtaacctcagggccacttagcaactacagcataaactcattctcctaactctgttcaaggtaaaaatccaaccagaccatcactgaaaagggaactgctttagacatgtaaaaccaaattaagctggcaggtgtcttgccatttcatgctgacagtcaaatgtttcctacaaattaacttcaaagaacagggactcattacgtagatattaaaatctgtgaatttctctcagtgcaaatagtattcccaacatattttaaaaaggctgtagagggtgcactgcatttctacttggccaatgagggcatagaaatgtcattcaacaaagctaaagtggacctggagcaaagggatggtcagtgggttggcaatctagaagaaagagcagaaaatcacaactaaggacacacaagatggttctgtaaaagggtttgaagtcagagtagccattaggtgtgaacatatcaggtcaggttcagccactgtaactctgtaagggtaagaccatgtgcccctgggagagctgaggccggacgcagggcttgagagagtggtggtgcaggaggctgcatggagaaagctctgctgcttctgtgagggacgcaccagcttctgctcccagcatcaggctatgatgaggagagtgtgagaaaaaggacagtcgagggaaacaggacgcaggaagacttggcaggaatgaagagcagcatggagaggagagggaagagcgctgaccaaaggggcacagagcctgagacatccagcctgtcactggggagaaaagccacaagcacaacgtgctccaaggcagccaagagccccgaggggcggcccctgtgggcttccacaaaatactgtgtgcccttcctgagtggtgaatgaggggcagcatgtctaatggagaggaaaatgaaggaactacccgggcacgaggccaaccagaccctcagggtgaggaggacggtcagggagctgggggcgggcagaggcaatggtcaaggccacaggcgagcccagggcaggactggacagagagcagcgcagcgactttgggagggggacgtgggtaactcctccagccagagcaacttcaatggctttttatcaagcgtctgggttaagagaccactaagggttagataaaaggctgtagacagtaaacaaggcttctgtgaggagacatgaagtcacacatttccgagaatccaagaattaagaagagacaaaagggatgcttttaagggtagagtcagagtttttacagaaaagagagaaagtgggagtggacgaaggccctgccctgagccaggcgtgggctgtgtggggtgtcgtctgttcccaataaaggaaaaaagggggctctgcaagaacttagaccagctggaaaggaaacaaatataaaataataaacggggataaaaacaaaaataaatgtaaacatcaaaaacaaagcaaaaagcgtaaaggctgcgaacactccgttgtgtgccaatgctagggcacgtgagcgtttccatcagacgcttatcgggtcagctctgggacctgggagaataccacaggtgcacacgcacacacgtggacacacgtgcatctgcgcatatggacagagacaacagcgagcctctgcaaagcgcagtctgccaggaaacacaggttggcacgtctggagtgactggagaatgacttcaccctgaggagccccggggtccagggaggcaaggctggggctgggcacagcagctggaaggggttttgtcctggagtctgatctccagctgggaaacatcccagagagaggggaaagtggtcaggacgctgaggaggaaggcgcctgactgtgctagaatcggggctctgtggaaagacaggacctgctcagtgggagccgtgggaaaagaggggggcaggctggctctggtggggttacatcagagctgggcagaatagatctggatccccaggagagacataagggtgtacatgttcattaacatgctaagtggtcacttacaaaagacaagatacttatctacaagcacttgtctactctgctttcatcactagaaaagatgtcgtaagattgctaccgattgtgtgcaaatatctaacattcgtgataaattatatattcagaatataaacagcacagaaggtgtgcaagtatgctataacaaatcagttaaggagtctcacctggaggtccgggttggcctggtagtcctgggaaacctgaaaagagaaagagagtgttggatcaaacagaacagttcacccgtttgtatacacttcttatttctctactgaaagccttgcttggtgcattggtaagtgtccatggccaaagggaacgtagaaaacagagcgggagaccacccgagcccccactctggaaatgcattgctctcaaagctacagcgaagggctcctgaagcctgttgtgacagtgaaataggaacttggaggagacctggtcacagacagtcctgcaaggcctgcagatgcttccaaaatatggaggaacacaggtcaaaactagacaaaaagaggggaagaaatagaaagcgtggggagagagagagaaggaggaggaggaggaagaggagaaagaggaggagggggaggaggaagagaaggagggggcggaggaagagaaggagggggaggaggaaggaggaggaggaacaggaggaggaggaggaagaggacgaggaggaggaagaggaggaggagagaaggagggggagtaggaggaggggggaaaaaggcaagaaagctaccttttgggcctggctctcctcttggccccggagttccagggtagcccctctctcctttttctcccaaaggtcctgtgcctataacctgaatcgagaaggaaaaggtgatcatcccgtggcatgggaatggctagtcctgtatagtaaagcagtatgagtgaagaaatgtacatatttgtttttatttcaagaaatatgaaagtgaagtagcagcaatggtagcggacaaggaggaaggggataagcctctaaaacatatgggacaggccggtgcggtggctcacgcctgtaatcccagcactttgggaggctgaggcaggtggatcacaaggtcaggagttcgagaccagcctggtcaatatggtgaaaccccgactctactaaaaatacaaaaattagtcgggcgtggtggcatatgcctgtaatcccagctacttgggaggctgagacgggagaatcgctcgaacccaggaggtggaggttgcattgagctgagatggcaccactgcactccggcctgggtgacggagtgagactctgtctcaaacaaagaaacaaacagcaacaacaacgaaagcatatggaataaacatgctgcaaccatccctgcaaaggatcctgccaggcaggcggttctgcttccttttgtaatagtttgcctggcagcagcttttgtaacactccagtgaggtaaagatggagtaacatcaatttgaggcttagatttataatttctaattgtacatactagccataaacagaatgttttactttacaacgtattatgagaggaacactcttaaaaaaaaaaaaaaaaaaagtaggcgcttccttaaggtcgcaagacaagaagaggcactttcggctccttaacaaggagaaaattcactggccctgattctaaattaatggaattcaagacaagcggcaaagtcaacttttgcatattacctttgaactataattcctttgtatcaattaatagatattattaaaatgtgccaatgttaaatagcttgacttagtcatcccacaagttatatatataaaacatcatgatgtataccataaatatatacaatttttgtcagttaaaaaatgaaagtaaaacccttcaatgtaaatctataaataaaatgggctgtgtgaacgcattacctgtggcactgcaaggaaggcagcaaaggagagaacggtaacattttcattatttcaaaaaagtctgggggcaaaatggctaaaaaaattaaagcacaactctctgataggacactgaaaatgatcaccatgaagatatgtgcaaacatgataatgcccatttttaaatgtcacacacatcactgacaagtatgcaaaatatgtatgttgaccagtagtaaaatgttatttgcaaaaataaaaattgttttaccaggatagttaaattacagatgacctgtttctcttacaaaaattttcctcaatggaccacgtttttttaaaaaaggtgtcaaggccaggcacagtggctcatgcctgtaatcccagaactttgggaggccaaggtgggtgggtcacctgagatcaggagttcgagaccagcttggccaacatagtcaggccctgtctctactaaaaatacaaaaattagctgggcatggtggcgggcacctgcgatcacagctacacggggggctgagatgggagaatcacttgaacccaggaggcagaggttgcagtgagccaagatcgcaccactgcactccagcctgggcaacagagcaagactccatttcaaaaaaaaaaaggagtcaaatatgttgctaatattctcattcatgtgcaaaccttttcattttcagtgatttaaagatgtgcagaaattatcaaaatataataaaaataataaacacgaaactccgtacaacaaattagaaaatcatttcaagtagcatgaaccactttacataacaaatgcaattctagagacagctgtgggtgtgtgccctgcatctcctctccttcctctcccagcgctctcacagacccagggtcctctccttcctccccccagtgctctcacagacccagggtcctctccttcctcccccagcgctctcacagacccagggacagcactcttactcacaattccaggtgggccaggaggacctgcttcacccttttctccctacaaaagaaaaaataactttccttgcatattcttactataaagattgtcttgcagaaagcagattaaacatttcttctggtaaaatagagtgtgcctacagtaaattaaaactatttttctctctttaatatctctcattctgtgacgattacaacaaaaatgaatagatttcattttgctttgcacacgcatgacacatgaaaataaagatctctgcaaaatataagttgggggctaattattctccttacaaaagcccagatacttgtcccatcaactgcacacttcctcggaaaacagaatcattgatgagcggaactggcaaccagggtttttcaattttaaaaagagaaatgaaataaaataatataaaagcatgatttccaaatacattttcttaaataaatcattttatatgatgtttttaggtgaagattttctcaaatttgcattggaggtcataatgtaaaatctaatattaactgaaaacattagtggataaattctgatcactttaaggtttaatctcatccatagtagatgaaaaactcaaagaaattaaccctttcatatcaaatatttttatataaacgtcatcgtaatgatttaaacagtccaaagatatgtacattttaccatgaatgtatatattttccttttaaattaaggcagtaaacaagaattgaatgttttgatttttcttatatgaataccagaagattttagaaatatctagaggacataaatatcttagccactatattctaaatatatctaccatttaaaatgtacaggattttacttcctcaaaaaattacagccaagggtttcttccttttgtccctggctttaataaattaaccgtaggctactgaggccctccccgcagctttccattcgcctttggtgatgactattccaaaattatctcttatattagtaaagacttacattacctagtctcatattaagagagaaaaataaagcaataatgaggttttttttttctgcctgtcagattgacaaatattttttagatttttttttttttttagttagttccccaactaaaagggccctggtctggcagaaggactttctggggcaatttggttgcatgtggcaaaaatttcaaaacaagtgtctgactgtggaccccaatattacgcttttaggaatttgacagagaaatgaccagacaagtgagcaaaaatacttgtaagcatacaaatttggaaatggcctaaataccacgcaacaaaaggcatggatgttcacatcataattacactgacggccattgaaatagatcctccttctatcattacgtgaaaaagcaagatgtcttgttcactatcacctttaaaaactgcctgcttgtgtatgcacataggaacaaggcgaactctggccacttctgaacaggtaacagaaaaaattaggtaagctttctttacctcgtgatatctttctgtattttctattgctttatgatcaggaaaaaaataatctactaccaaaaaaagatataaaaatttgaatgaatggcacatttcatatatttttattttgtaaaaaatcatgaacataaaggaaaccactaaattgtgtttttacccagaagaagcataaatgatttttttcccttgagtacagagtcctttattctaggaaagaataaacagacttctgggttgaattggaaagtgaagataaaggctcacaatagtgccagcgtttacctgcgggccctggcggcctatgagtcctgggtacccgggttcaccaggaaaaccctgaaaccgaagagagaagcagtaaccgtcagaggccagtggtaggaacagtgagcctgcttgtaaaaaccacagagaaacacttacgggactccctttttcccctttgtcaccatcttttccgggtttgccctgtagaataaagatgtaaacgttagtatttaataaataatagactgcgcgcggtggctcatgcctgtaatcccagcactttgggaggccgaggtgggtggatcacctgaggtcaggagttcgagaccagcctggccaacatggcgaaatcccgtctccactaaaaatacaaaaattagctgggtgtggtggcaggtacctgtagtcccacctacttgggaggctgaggcaggagaatcacttgaacccaggaggcggaggttgcagtgagccgagatcacaccattgcactccagcctgggcaacagagtgagactctgtctcaaatatatatatatgtatatatatataataacggatataacaccaaagctctgattcagatagcttaatatgttgtctctcctatgaaacacaagcaaggtaaatgagggttctatgtaagttgacaataccacaataataagtaatattgtatatgatgaataattatgaaacagttacaatataagagaactccatttttaaagagcagagtccgatgagctacaagtcttctaaaatatgattgtatcttggtagcaaagctaacattagagaagtttgcctattggcagctgagtatttgcaagcttatgcaaatgcttcatttaatgcaggtttctgcatgctccttccaggtagaaaccagaaccatcccagctgactggcagtggggtgggtctcacgccaccaccatccctaaagtgaaaagcaactcagcctctcaggcttgtggctgtgcaaacactgtctggtgttctgggtggcaaagtccaaccaacctgctgctctcagagcaggaccgaaggtttcagggatggcccagggctcttcagaagcctctctgaacagccggcggtggcaccttcagtgctggatccttaaacagggaaggacctcgcctgcctgggaagccttgcaactgatatagctcaggagagtctcggaaaagcccttcggggcatgaaagggataaactagaagtccctacgagccttttctgttcttgtgtttctgtgaatctgcgattttccgcatggaaggagaattgttttatgataaaaggactttggaaagcacttactctgggtcctggttttccgggttcacctttctctccgacccctggcatccccttaaaggaataaaaagacaaagagatttattcgtctatttaagcaaaatttaaattagatagatattaaacttaaggtgaaaaaaacttgaaacttaaatctttatggtctttgacctaaaaatgataggcagaaactgagtactgacctgaaatccaggttcacctttttggccctgaaagaattcgagagacagatcagcactatcaaacagctgtatcatttgttatatgctgcattaaacacacagcagaaaaaaaaaaaacctttttctgatatattaacaaagaaattcatgttgatctccagcactcacttgacattgactggtataaatgtaagcagggcagggtttatcatgcttgacccatgatgactggccctgcccccctcctgccccccagcccagctccctcctcctgaccaagccatctccaacttggggcacatttaagaagccctgatccagcggggtgagcctcagatcaggcttggaccaatccagttccagctgtctctgctctcaaaggggctcgtattttatggactgaacagtctataaatctgttttccagaccaggattgaatgtagctggaaaaactgagttttgacccattttctctttatcttttggaatttgtccaaaattagaaaatcagtattcactgatgaagcccactcataccttttctcccttggtggcgaagtctcctttttcttgaacttgagcttgtcctggtactcctggaggcccactgaccccttggtcaccctgtcgacataaaaatgtaaaattaattaggcatgaaaacaattatgcagacatgaaaaattgcagagagaggtaaaagcctaaaataaaacacctatttttaaaatgtaattatactctattctgttctaatcatccttgcctctgcagaaaatcaaatttcaataggaagatgatacaacaagtatctaaacccaggaggagaatttcacttcttctatgggtggccactagctcaggaataaccatggaatctgaacacctgcaagacacctccggacttgcgtgcccctgtatagtgtatactggcttctgatggcacggaggaaaggaatacaaactacctaatagagcttgagaaaaaagaaggcattttaggtaatcccagaataagacaaccatcaagagtctccctcctcgggcatcctaactgccgggtacgcctaaaaattacaactgcatacatttcagagtcactatatttcaaagtttatgaaaagactgggccaaaatcttgggtggcaagcagaggccacctgcacatccagatccatccaggccccactgtattgggcgctctggttgtaattgcctccaccagcttggatgtcagaggagaatctggccttccacaggctggctacagcaatggcaggcatcccttcttagccagtgcctgcttcattggtctgatccagggaaactcctggagaggatcagggacccaccacttgcctcctctctgcaggatgaagccacctgctgtgtggtctgtgccctcccggctccacactgcatctcctcccacacccacttggtcctggacctgcccacctctgagaagagaggccggtggtgcggggccactgccaaccgtgctagtcctaattctcctggtggtggccctggacatgcccgcctctgagaagagaggccggtggtgaggggccgctgcccaccgtgctactcccaatttcctggcggtggactcccgctctgcagggcttacagggttactcatctaatggtcaagtcctaaatttgactcataaatcctaggtctgacctcatcactgacgaagaagagtttgaactctttgtacagataattggagttagtctcgttgttctctgcttgtcagatcacagagcacttccataaattctagcgtactgaataagctagaataaattcaataatgctggcattttaaggaaaacactaactaccaaatgcaagaacatgcagagaagagtaactatacttgtaagagtccagacattgatccaaaggtgggaactgtcaggtgaggactgtggttttcaacatgaaagcactccagagcaatatgcactcaccttgtcaccttttggtccttgaaaacttaagcccatttgtccctgtggattaaaaattaggctctcattattagatttgtctacttcgttcaaagtcattctacaaacctcacacaaaatgcaataagatggtagatttcaggcaatagctttgtcccataactctcataaaattttctggaaagtaacgatcatgctgaattcaatgtctatgaaaaagtttttaaagtatgactgatcaaaaattccaaagacctttttaaaaatttacagtttttaaactcttgcattagaaaactaagggaaatatcagtgtgattccaaagtattgactaagggatggatgaaagaaaagatcaatatattgatagataatcaatagataataaatgatatatgatagatacttaaaggtatagttagatatagtgttaattttccaacttttttttagagactgaaagaataagaagagtgagctatagcaatttcatgatagccttatactaatgccaaagaacaaaaaatgaaaagaacttttaccttttcacctggagggccgggagggcctgggggaccctgggagagacagcattttaattaaataggattcagaactctagggagctttaagcccttcttcaggctgacgttatcttaagattctctggtcaacatgataatttatttgtgaaatatttttcctgggcttcccctccctccccactcctagcaggtgcaggaccctcaggtgtgaccataccaataccaatccatctcccctgctccctggtgaagtcacctggggcacagcctgtctgtccatctttgaactcactcccacaggctgtgactatcagcagtaccccgccagccccttcaaccatgactgcattatttgtttcagggtatcagtttatggtactatcatcatccctttcccacagctctgggtatatgggtaccgggatgccagccaaacgtttagtaagagggaagctgattccgccatgtccaaattaagagcgaccacaactgtgtaaagtttttactaaattattatttattttcaaacctcaatatagttgttttttaaatgattgcctcggagagacagcccccaaaacttactggtggtccggtaaatcctggaggcccaacaggaccttgaagccctggcagtcctggtgggccctagaatgcatgagaaagaaatgagttcagatgcgaactgggagggtgaggtggcacatgttcataatgattcagcaaatgcttactggagtccctgggattccgggaaatcctctttcacctttcaacagcatcccgggcacatggccaagtatctcacctggatcaccctagaggatgaagaaagaaaatagaaagttgcaaatatcgacattcatgtaaagaagctgaaaactctttgatagttggcatatattagtgttacaggactagcctaagtctgggatttagaccccgtctacactggaaatcaatagcctggccatctctcccatcatgattgccgtcttaatggccagcgttaaccactgcctggtcaactgagccgcagccgggactgaatgtagagacggcaaagcaaaggggtctgccacactgcccgaggaccacccccaactctagacaagggcccttgtctctggttgaaagactactgcgtgaccacaggctctcctcacaaaacaagaattctcttttgagaaaaggctcaggatgaatacttttataaaagcacggcgtaatggtaaattttatctgccaacttggctaggccacattattgggttaaacaccagaccagatgtttctgtgaagggatttttaaaatgagcttaacacttaaatcagtagactctgaataaggcaaatggccctccataatgctggtgggcctcatcccatcagttgaaggtcttacaggataaaagactgacctccctggaggaagagggaattctgcccacacaccaccttcagacccaagactacaactccaccccttctctggtgtctggcctgcccacctcactctgcaggttttgagtttgccggcccccacaatcatgagaaccaatgctttagaagcagtttctcctctctctggccacacacacacatgctcctggttctgtgtctctggagcatgctaacacacagggctattatgaggatctatttcctacgtgttctgaatcacaggagcgagcacagggactctcaccttcatccaggtaagcagttatctctactgcagctgctgagacctgtaagcctccctttgacaaggctgatcccaacatccagatgcccgaggtccccgccctgtgcccaagcacagccgacacattacatgactgcacagtctgaggtcgggctgatgccagcagccgagccccaagacatcaacaccccgcctgggaaaagctgccccaggttccctcctgggaagtctgagaggcacccagggagccccattctcccatctgcctccccagtttgggtgaagtgagccttcgccaccacaccaggcctccttccgctgcttattccccattaagaagctgtgccaagtgtctgaacgttagagtctgagatctgagtttgtgggttacttgtacagtcttttcatgtaacagagtttagggaagtgtgttcagaaacaatcgatcagccaaagtggtttaaagagaatgtgcttctatggcacttgttgtaaacagattccctgtaatgaatccaataaagcaaaataaaataaaatgtaccttcatccctggtaagcctggtggtccctaaaaaagaaagttttggtgttagttttgtttttctcaaaatatcattagcattaaaattgttatcatgtaatattatatataaaatataagttattaaaacataagcaaagaaagaaagaaaaggaaatggaatgaaaagagagaagtcataactaaaagaaagaagttctgccctaaataacctctactcacgggatttccagcgaaaccaggcaagccaggaggcccgagcggccctctctccccctggggagacagcagagcatcattcatacgcactgtgtgtggcagacacatcagccctgacatcgcatgcatcactctgccctacccttcatttgttggttaaaatcatttcctaaaaacagtttgtcacaagctgtgctactgggtaccactttatgaaagaagaaatagacttgatagtatcattaatagggacaaaggcccataatggcattttcttacgtgatgtagtaaatgattataggtaataactttcgtgcttaaatgcaattttaggataaaagtctacaaaaaagaaaggaacaattatatctttctggtacactaaatatgggaaaactgtatttccttactaaataaagcaaactttaagacaagcaactttccaattgtggcaaataaaactctattaacagaatcacactacctgactccttaatatgcaaaaattacgtaaacacacacaaaaaggagggtctcggttctggatttacctttgtgccattgcatcctggaatacctggggggcctggcgggccgtcttggccaggaattccctgcaatgaagaaagtgaaaatgtaacccaggcagaaaatcgcctgatggaagaatatttcataaaagaagtagagcacgttttctatacatacgggaagtcctgggtttccagggtagccagatgctcccggaggtccctgtgagggcggaagtaaaagcgtgtcagtgaagagccgggaagcctcacttcctcctcctgcatctccccggttaatggagtcatgccctcatttttggtgtcagaacacacacaaagcagacagagcactctgcacaagaggcagcagagggcacagcctagggcagatggcccaggcttacaggagcaatgctacacccaaagcacactactgccattcgccactgcaaagatatggaaccaacctaagtacctaccaaccaacgagtggatagagaaaaggtggaatccatgcaccatggaacactactcagccacaacaaggaacaaaatgatgtcttttgcagcaacttgaatggagctagaggccattattctaagtgaagtaacccaggaatgggaaaccaaataccgtatgttctcacgtataagtggcgtctaagctatgaggatgtaaaggcataagagtgatacaatggacttcgggactcaggtggggggaaggctggaaggaggtgagggatcaaaaactacgtaacaggtagagcgtacactgcttgggtgacaggtgcactaaaatctcagaaatcaccacgaaagaacttatacatgcaaccaaacaccacctgtaccaaaaaaaattgaaataaaaaaaaacaaaaaaataagtttttaaaagctgactgctgatcccttcaaacataaggctgcccatgcacaaaataactctgctcccatttcatcattactaagaggtggagaggaggaagagcaaggctggctctgaaaataccatgacttttccattaaatgaagtcatctctgtctaatgactgtggacacatcatcaattgccccttcccccaaattaaaaaatgcccagaagagattcctgaagaagaacaaatgggggaaagcaagtttgcagaaccaaggactaaggagctcagcctgtgcacagtccccatgggaaggactggggctcagggagtcacgggctgctcctcactgcctgcctcgcgcctgcctgcccgtgctgtgtgagctgggagaggagatggaggacgagggcaaggagaaaggagggaaaaggtgcccggctctggaagcgggcctgtcccacgcatggaatcatcgattgtgagtagcaactgtactcactcttgtcccttttgttccaggtagtcctggttctccagtatcaccctggaacagaatagaaatgccattgtcattgatcaccgctatctcaagaatgcgggcaatcttacatccacccacccccaatcccacagccgtgcttaccttttgtcctggtggtccctgtggcccctcaggtccttgcattccaggaaacccaatgacaccttgtaaccccgggaggcctctttcaccctacagaagaggaacatcagtcaggcaaaaggcagcagtaaagaacagaggaaggaattggtgaccaactgtgatggctatatatatattttttttgagatggagtctcattctgttgcccaggctggagtgcatgcacgatctcggctcactgcaaagtccactgcctgagtcaagggattctcctgcctcagcctcccgggtagctgggattacaggcgtgcgccaccacgctggctaatttttgtatttttagtagaggcagggtttcaccatgttggccaggctggtctcgaacttctgatctcaggtgatccacccacctcggccaccaaaagtgctgggattacaggcatgggctaccacgcctggcccgtgatgcctaattttaggtgccaagttgactgggtcacaggataatcagagagctggtaaagcatgacttctggatgtgtttttgagggtgtgtttctggaagagatgggcatttgaatacatggacagtaaggaagatctgccctcacccagggtgagcaggtgtcattgttagttgaggcccggatagaacaaaaaggcagaagagaggccaattctctctcttctggagctgggcacccatcttctcctgcccttggacatcagaactctgggttctctggccttcagattcagggacttgtaccactagccccttgggctctccagccgctggccttggacccagttacacttcaggagtcctgagttcccaggcttgcaggcggcagatcatggaactcctcagcctctataatcctatgagccacttcccataataaatctaagcagcatccagccttgcgcaagtccacagtgagtgtctggaaacagatagcaacgactacttcaggtggttttgctctactgtgttttaaactcttgagggcaggaaatatttatatctcattcctagcacaatcctttatatgtacttaatgccaaataatttcttgggtaaatagagtaacaaatagcgaggtgtttttcactgaactggttataatttcgctcaatcaatggaactctcttgttagcaacagcctcagtgctgagattctgtgatggagcctccaagacgtcttcctctttagagaccattaggagatgtgggtgggcagagtccacagtgtgcacctcatgcaagatgcttagcctcccttgggccatcatggggtgatggtgggctttaatgagaaatgtctttcaagagtattttttgggctgggtgcggtggctcgctcatgcctgtaatcccagcactttgggagatagaggcgggcagatcaccagaggtcaggagttcgagaccagcctggccaacatggcaaaactctttctctactaaaaaatgcaaaaattagttgggtgtagtggtgcacgcctgtaatctcagttactcaggaggctgaggctggagagtcacttgaacctgggaggcagaggttgcagagagccaagatcatgccactgcactctagcctgggagacagagtgagactctgtctcaaaaaaaaaaaaaaaacaacaacccataaccattgtaagaaatcaagaaaacctatttactttacagcatgtggacttcagtgcagccttaccatacgaattgggtagattcagtaaccattgttagctgatttaaaaacataaggcagacagtttggagatcacaggcaggattacttagtgttcagtgcctttctcaaagttgcattagttgaaagtaaaaatcaaccgacaagctacacaccacataacataaacatccaaagtcgtccttctttccaaaccactcagccagtcctggcacttaactggtgaattaactgcctgctccatttttacaaacgcaggaaggacgttatgaacctgggactcagccgccacacctccatagagctgtgtttcgttgaaaggatatgtcaggagtctagacacagtatgtggataaatatgggagagattgtttcaaaccctaaagaattgaatcaaacagtaaatggattaaagaacctcaagccccatactgtggcactgccccttcaggccagcagcatccagggagtcggccagaagcacagacgtgactccacgagggccctgatcccaaggtttgacagggaaggctggctccttctccctgaggcctgtgacagtgaggaaggaaaaacattcccagaccaggacttgttcaaatgaagagctccttaaatacaccctgcagtgatggccccaggacacaatggcagaaaatcctgctgtaaggagttacagtgcacaaggtcaccaatctggggcacccagttttcggatataggaaaagtctgctcaaaccagaataggactgaactccaaacagcggctaaaataaataaataaatatggacttgtgtagccccaagtaacccaacatcagacaggaaggaaatgagaaaggcaggtccatgtagaagctttctaatacatttggtggagtatttttagtacttaattaatatgggcagtatcgccatgagaccagcgatgataagattttataattctcaatttaaccatggaatgcactgaggaccagagccagattaactgatttctacaagtttctcactgagtcagcactacagccagaaatagaaatgaggtcagcctccaccatagtccctgttttttctgggtcactagagcaagccggttcccagcagaacatcaaacaattcaccaacttcatgtcagcccaaggtaccgacccttctatgtccatttcacagatagggaaattaagattccgatgcttaactgacttgtcgtacgtcactgggtgacccctcgtgctgctgggaacagaacacagaaatccaaattcccagaccttgcttttaccgcaagaacacattctttcccaaatgtcaccagaaagtttaagcaatctgtgtatccccagagctttgaaatgaaggagctaagaaggaagtgactcctccatggacatggttcttgccattccccacatatttttttaacgttcttaatcttttgtccagataaaagtgcacacgaataatctaatactctgtaccctgtccaaggttattatgggaaccagagcagagcaaacggacagaataagcacttaaacagctatacagttagctggcgaccagcatgcagtatggggccaaattattcctccaagattttagcacatttccaccaggattgtaagaagagcaaagagctggacatgttgtgcaaaggttattggagctagcagggtccaagccagactttgcagctgcaactggcaatgctactaacgtgaccacagtgaccccccacttccactggagctcaaggcagaatgtgcacagttagagtcagggagcaacaggaccctcgatcatctgtttcccatggtgtgctcaaggcaaggtccaaaaatccatggcggccacagacttcatgtcaggcaaaaatgaaaaccacaaccattgtctgtcacagcaaagactatttaaaatggaagaaagaaacgagaaacttgaaaaatactacacagaaagttttcgtgcagctgaaccttgtgctctcattcctgaacatcagtgcaatgcagagcactgatcaaaaaaggaaaatcatacgccaaagccggagatgactactgctgtgtccccaaatgatgaaattcagaatttgtggagggagaacaaagtgccattgtctataaagatgaaagaatacaacatggagaataatcttagcaccaaaattaggcattgtaaattaggcatgaaatagggtttcatgcatggagcaacttaaaattcttgcttaatgcattatctaaagcaagcatatactttttaaaaaatccttaaaatgcgtggatagaaagtcattttataatacccaattatttcccttcctcttccaatgcttgtagaaacaagttcatgattcaggaaagcaaatactctaataagcttccgtcatagctaagtcagaaattcaaatacaaatcaaatacccaggacagctgaagttaaaatagcatgaagcttctaaatgtggggggaaaatataattaccaacaacaaaaactgatgttaacacaaaatatacctagaataagcagtcatcaaaattcttactgtcaaaggcctgtttcagtggctgacatggaatccatatctttaaatcaaaattttaatggatttttccaatctgaaatattaggatcacggatcttcacaatggactgaagcacacacagagatgctgccagctctcgggggcttcctctacgcacggaatgagtacgggtaccgggtttggtactgagcactgagtgtactgggtatggcagcctccatgtgctgggtgcatccaagggaaacaagcaatgcttatcagggaaactgcaattccttctccacctcaaccctgtaacttcttcacaggcaatgaaattgttttattcattcatggtgtttgaattcaataaaatgtcatgggatgctgaactagccaattgcataacatgacgctcagcatgaggtaggattccacatacgaatcctaaaaactttaagaggtagtgaaaggttactgggcaggacaggacccccgtcgcctttgcagtccaagcattctaggcaccattccagactggctggagtccgcagcagtggctgagaggtgcagggcaagctgcgttcgggaccacgatggccctgctgctgctttctgtcatctagcgcctcgagatttccatttacgagcagactgcaaatcattcagggaatgaaagccctcacatttgaagccagagctcaccaagtatccagtgaaagggaaatgatgtcaaggatgggtcacagtcagtgggtgactgcagaactctttccgaaattccacaaggccaactccttgagcccaaccaccatcagaagagacatcagaagagacatctgcaggaccatttcctgaatgccgccgctgggaaaggggtgggaaagctgcggtgggtgccgcggggtcatggaaaactctgtggcgaggccccgccgggagctccctccacaccatgaggcttgacgtcagggcaggaatactgccaccacagtttgaggggggacagatgcaaggagatcccctagagggtctgctttgcctaagaggaaggcgtgagtgctcactctcctttgctctatgagacatacaactgaactcttaaaaggatgtatatgtgttcactagaagtatgtgaatgaaatttaacagtgtggattgttgcacttagcagctacatttatcattactattatttcttgcatttaaatatttaacattaaagcagcaaagattaaaccaatcatgcataaaaagcgtggctgcaaatctgtatcttcttcccgaaattctcattttctccctccagcccagacgtctagcttgagacagtgaatatcaggaaatgtgtgcagtggccctccatcaactatgtgggtatacgcaagagcttgagcagcacatacagacgcacctcagcttatgatggggtatgtcccaataagcccattgtaagttgaaaatatatatatatatgtatatatatatatatgtgtatatatatgtatatatatgtatatacatatgtgtatatatatgtgtgtatatatatgtatatacatatgtgtatatatgcgtatatatgtatatatatgcgtatatatgtgtatatatgtatatatgtgtatatatgtatatatatgtatgtatgtatatatgtgtatatatatgtatatatgtgtgtgtatatatgtatatatatgtgtgtatatatatgtatatatatgtgtgtatatatatgtatgtatatgtgtgtgtatatatacacatacatacatatacatatatatatatatatatttgaggcagggtctcactctgtcactgaggctggattgcagtgttactatcttggctcactgcaacctcagcctccgcagtagctgggattatagtagtgtgccaccatgcgccgctaatttttgtatttttagtagagacggggtttcgccatgttggccaggctggtcttgaactcctaacctcatgtgatttgtccgccttgtcctcctaaagtgctggaattacaggcgtgagctactgcacccagcccaatagaaaatatttttaactcaaaaacacatttaatacacctaacctacccaacatcatagcttagcctagccatccttaaacatgctcagaaaacttaaacactggcctacgttaggcaaaatggtctaacacaaagcctgttttataataaagtgtttaatatcttgtgtaatttatcaaattctgtatcaaaagtgaaaaccagaacggcttgtggctcctgactggcattgcaagagttgcctatcgcacaatgctagcccaggaaaagatcaaaattcaaagtttttatcttttgaattttgatctttcaaaatccatgactttcagatatcatgagagctgttctatttctaggagacttcgggacttgtcctgcctcttctaaagcacgtggggttgtttgggcaagttcctcatttcatgggcctccaccgtcctccttctgactatcattagcttggttctgactactcccaaggctgccgatgatggagatgagcaaatctgtgtgaagaatgggagagaactcagtgctggagtctcctggccgaaagaacagtggctggggtctgaggggtgggagctgggctggataaactagaagtgaaaatgccttcctccgtatggccaagcctggactacaacttttatactggacttctggccccaggattcttgagtggaaaatcccaagccctcacgataaggtccatgtgatgaagaaggtccaccctgtgctcagcgaaagcctgcctgcagctatagcatttaatgcagaattgtctccaggtgtccatgttcaaggagagatttctattggacaaatcctgatgttgaaacattatctgagcccatgatgaattctggcacaattctaggctcaagtattctaatatgaattttaacattcactatgaagttgactgacagagctgaacactcaagtcatatgtaatccaaagctagaaggcgatggttacaaaggagatgcacagtgaatatttctgatagatccacatttacaaagaaataaaaccatagatattttctgatccatgaaaatccactttgcacatcagcttaaaagaaaaaaatgaattaaaaagagtccttcagaaaatactttctaaagaactatcattcaacacaagaataactcaagggggccctcagtatggtcttcttataaacaatttaaaagttccccgaaagccatccaaaagcaaacaaaccatctgacgtccccgatccagtaaaaatgttctaggagaactgagtgctgataaattactggcagccaaaaaaaatcttaaaaatttccaaaggtctttaaatcttaccaaagttccagacatttgtccatgatgaaagtggagactcactcatggaagcgcacagtaaagctgtgagcagcagcaaaggtctccagaggcaactattatcttcaagagttttttcttatcttttttcagaaaaaacagtccaaaatgctctcattaattcttactccaaagcagtactccgtttcaaatattgttaaacagaaccattttaagtcagtcccccagagcagtcagatttccacgttggaaaggaagaaaaatatgatgatgatctttttccaaaggcttgtgaacctgctcagtcagattccacgtgtgcctgcgctcaggcagcgcgtctgtcatcaacagcttaattccgttttcgcatcaaaccacaccagcagacagtgcgttctctggaaacacttgtattttcctggctccgggctccatcaacaacacattcaaatgcccatgtgaagggccaagctcctggtcggggcgtccgtagacacccacccttcatccacctccaggcacctgcgacccacacagcagcaccccagggccctggcacccctcagcacattcgagagcgctgccttcatgtgaaacaggcacattcacaccctccccggcgggccctggcacctcagacacacccatgggatctcagccaagcacccccttgttgaagaagtactcagacactgaatgatctggagaaaacccaaactctggcagacagtggatccagcccgtgacaggcccgggcggaggaaccaacggcctcaatcagggcttgggtgaggagtctccgtgggctgcagctgctcgccactagagggagctctgggactatacattttcccccaaataaactaaacctccctggtggaccttaaagaattaaggctttttcaggccgggcgcggtggctcacgcctgtaatcctagcactttgggaggccgaggcgggtggatcacgaggtcaggagatcgagaccatcctggctaacatggtgaaaccccgtctctactaaaaatacaaaaaattagccgggtgtggtggcgggcacctgtagtcccagctactcgggaggctgaggcaagagaatggcatgaaccagggaggcagagcttgcagtgagccgagatcgtgccactgcactccagcctgggcgacagagccagactctgctttaaaaaaaaaaaaaaaaaaaaaaaaaagaattaaggctttttcctaaatattcattgtagtaatatattactattaaaatattaaatattcagtgccattgaacacattctgtgggcggagtgagagaaatcactttgatatggcctaaaagaactctatggtaaatatttttaattaggattcaaaatttaattaaaattaaatataaaaactagtaacctgaatatcgaggctattgcgttacaggtaaatgcggtcagcctataaataatgagaatgatggatattttctggatagcattttcacatccattttataaattgggagagtatttgaatctaatgacaatacagaaaaaatagcaaattcaatttttaaaatagctgtatggaaatagaaaatactgaaaaaattacattctacaaagcatgcataaaatagatacaaatgtaatcacagggaggtctctaagaaaccactgctaaacatcccactgccagtaaaacttatgtaaaggttcttctttggtcttcttccactataagtttatagaaaacttatgcattaaggtaatttagtccattctcctgagttttgccaattctaaaagaaaaaaaaatctatccagttttttggatcccaaaaaagatgataacattctctcctttgcttaacctatcagcatgaacactcattaaaaccaaaatcacagatgcctctttctaaacctactacctaacattctgtttctcaaatatatatttttaaaaacatcttcaaaacgagaaaaacagtacagaaaacaagtgttctgctacaggcttggaacctcacttgctgcagctatggacggtgtggatggttgtgcatgttgcacactgcagcaatcagaggccaaaatcagccaccgaagctaggtgttggcacagcaggaggcctttatctaatatgacaaagctggaaaaagcccagtggtagcaaaaccatcctccaaataagttgcacagagctctctgggggttcctgcctgggtgacaccccaaggatggcaggacacaccaagcaagaggcagcctccgtgtagactttagaggcttggtactgacctgccaagagttgggaagccaactgaggaatgtccctcaagagagccctaacccagggcaggggctgaaatgcccagtcaccactgccaacactttggttaacttttggttttggattttacttactccattaaaaaaaatatatatggaatactatcctcaaagacctagaaatgcacatggcataaatgaatgcttccaacttgagctccagccattgcaggaatgatcacacttaggaggtgctgagagtctgcacatgaaatcacgcctctgctcaccagcacaaccgtctttttttttgaagttccatgaaatttatcacaattctaggtcatgacttagttaaaagatttggggtaagaagaaagactgcaggaacataaataattgataacaaaatatcaataagaggttagctctcttctgagtttgtataagaaaaaaatatatatgtttttgagatggagtcttgctctgtcatccaagctggagtacagtggcatgatcttggctcactgtaacctccacctcccaggttcaagcgattcttgcgccttggcctcccaagtagctgggattacagacgtgcaccatcatgcctggctaatttttgtatttgtagtacagacaaggtttcaccatgttggtcaggctggtcttgaactcctgacctcaggtaatccgccagcctcggcctcccaaagtgctggtattacaggtgtgagccaacgctcctgacctaattttttttcttataaagacactttgctttattttcattagctccaaagcaaggcccctgagggttcgaaagacatgttctacattaacagaaatgttgaaaaatgccaattagtgcctaagtacttagacagccgaggatgttattaacgtgaacttaataatgtatgtgggtgtggggcagcgttgtggaacaaaacgaggacacagcaaaggcaggaaacaccacaaggtaggtgatggattttttttttctttttttggtctgtgataaaagtaaacttgaaaattgcagatgaaatactctgaagataagaattatagttaataatacaaaagcatgcaagacagtcttcaggtttaaaccttgagagaattgctcattggcaattaagaaaaacctttcttttttttttccttaaaaatgtgttagatataattatttatcaaaattgggttttacaggtgccctgccaggggacatccagggtccccatcctctgagtggttccgtagtccctgcggttcccttgccagggtgtgcagagccgcgtacatagcacctccaggagatgctggaacccagcaggcagtgactggcattccctctcgttccctccccccagcacttcgaacagatggcacagggtaggtactcaattaatattttcacgactgggccgggtgcagtggctcacgcctataatcccagcactttgggaggccaaggcgggtggatcacctgaggtcaggcgttcaagaccagcctggccaacatggtgaaacttgtctctactaaaaatacaaaaattagcccagcgtggtggcacacgcctgtaatctcagctacttgggaggctgagacaggagaatcgcttgaacccaggaagcagaggttgcagtgagccgagatcatgccattgcactccagcctgggtgacagagcagactccatctcaaaaaataaataaataaataaacaaaaataaaatattttcatgagtgactcaggaaagatcccaagaaaatgatataaatctacaagagggtgcagatttaggaatcttaatttcaaatgactgcaaaaacaagcacctgcactccgggtgagcacgcggagctccgggcgccctgcttttcatgctctctcttcagtcactgcatggatgggcaaagaacctaagcctggaattctggtgctggctccagcgccaacccctgggacgctctgaaaatcagctttgccatcatctgtaagtcagggatgactccacctgcctgttttacctggcagcattattttaaaaatcaaacgtgctcaagtattcagttaaatgctgtacaaatggttctgaaagaaactggtctgacttcactgctttttaaacacgtaaatattttgtgtttattctcacgatttctatgtccaacaagccagctgcatttcctctgaagccacagaatgttttaaaagagaatgaaaaggccacactgctagtgttcccacaagtcatgacccaggaagtatctcattcctgtttttgtggctaagacagacataagaaaattggaatttcttgagtatttaaaaaagatgacagtttcaagaaactcccccctttatcttatactcaaggttttgtgttttttccttaataaatatctctgtaattcaggcagttcaagcatagaacattccatttattctgtcaggtcagcctgggtcttagtaaagccaccacactcctccatggttagcctggaagtagctaacgacatacaccggtctgaaatccccagattacttccttacccccaagcaagttacttgtctgtatcttatcactgataacattttcccccagcatgctgcaataatttcaatactccattaatcatacttggaatctaagagataagaacagttcccttgactcccagatatacaattgccaggttaaaactagacaaaccaactttgcccatagaatacaaggtaatctcagcagagctggaggttttacaaaacccactattagcctaacctcattaatttgaaaaagcagtagtgagatcaatctaaattaataaataactgaattttaatctcttttaagtaaacaccattaattcctttaaaacatatacagtcacccaaagaaagaaattaagccaacatcttgaagttttttcttttgtgttttgcttaaaatcttggttttaaaactgaatagataagaaaagcatataattgcaaactcaatgcaaaataccggtgcttaattaagacaataaatagctacttcataaatacttaaaaatggtcttccctgagctgctaatctctcttcacctcaatgctcttcataaagttggcaagcctgttttcaaaagataatatggagatatatttcaatccaaggtgtggcccaattatttaaaaatttctatcagtaagaccttatttaatgccattttcactatgcctactttgtagacgttttaaagattaaacttacagtatcatttcctgcctttttttcttaactacttaatgtcaatagactaaaatattgagatcttcggctagaaactaagatgtggaaacagaccaactgggttacagtttgcaaattatgaggtataaactttctaataaaaatagattgtagagtatataaacatgttacactttcccacgtatatggatttttttttaagttacatcaattgggcgatagatgaccaagtatgggtacggtagacacacacacacacacacacacacacacacacacacacaaacacacacaaacacagaatcagaaagagagagagaaacgaagagacagagacagagagacataaagagagagaagcttcactaagaggcaggttgggggcacctggttcccacgcccccagacctcccactcccagggtctgaggtctgggacacatcactgaggcaatttgtctttggcaagagagggccagtcagccatgcaccctgaaatggccttcccttgattcccaaatatacaattgccaacttggtggaaactgagctctcatgggaattctaaacctacaggtgcccacccttggttctccacagggagaatcagcacgttctgtgaagaaacagggaaagcagtcatctttttaacaactatttgatattccacataaatatcctgccgtgggttaggcccagaattttgggataacaaatcaggcaaggacagggaggcagccctgtctcgggtctccggggaggcccgctgtggaggagctgatcccagagcccttcctggtccctgcggtccctaaatacaccctcctgggtggagctacacctcgctgcacacacagtcctcaggtgcccatttgaacgtcaccctcgctgggcaagaggtgcccggtgacaggtgggaaagggatgcacagggacatacacgcgccttacaggactcaggaagcgcagctgggcgggaccatcgcggagcacctgccaagccacgtgcttctgcagtaaaatcacccacatgcttccagagctgacaccccgctatcaagcacaggatgcccctgaggagtggtggtgcgggggcggggggggggtctacatcaggaacaaaatattggacaggatggaaaagaacatgtgtgttcttctctgtcactgggtgaagcagattcctttaaaaatccaattttgaagggcacatactgagtagcttccgtgcaaggcaagtttttaatgactacccacttccgggcctgtcactacccacttctggcccgtcgcacccagcaggcggctcctgcgccccctccaagtggcagggagaacagggaagccttggaagggaacacgtgacccagaatgcgaatgagcagcctccaggctgggggactcttctttgaaacacagggaagacacacatttaggattaacgatataacttcctaaaggcaaatgagtgagacaggaaaggaaacggatgcttataccaactcccatgttcctaaattatcatctatttccccctccctttgggttcacggccttatccaataggaagcccaaagaaatggcatctggtcaattgtctctagaggaggacagaaatcagaacagctagttaagaaagtcaggcaagatttaaatagagtgacttcaagtactagcgtccacttcacatgcccagataaaatgattttaggaataaaatatggagaatcaaattgattagcgaatggaaaaaaccacagacagtgaggaaaatgtaacaaaatttcccagctatgattgcttcaacttggaacgtgatttttcagaaaagaaaaaggggaggaaaaccagatggcattggggattccacaaactttggttttcccatcagcagatgtgaagagacagggaggatgaaggcacattggctcaatactgcagagtcaccgctcccctttcctcagaatacatcaccgaaaacatagctgacactgaggaaatgtctgcttgtgaagtaatcacccattatgggcctgatcttccttcacttcaaatgagtggacagttctgacatgtactgcataccaaagttcttttcagtaaaatagcttttgctctagaaaggccagtaacagtagagtgttgaagtacctccagcttcacaggaaagatctcaactcagaggacactaacatttagaagggttttagaggtcagagtcccaactctttcctcttaggaggttttcaactttaaatctgaatgactcgaattttttcacattgagaaatttccagccaattacacagttacttaaacacagctgggatgcattttgtcgccacacatcactgtacgtgtcctgcatcccaggataataaaagtgctgtgttctgaatgtccatgccccgccccaaattcctgtgtggaaattctaacccccaaggtgatggcatggaggtggggccttgggaagtgatgaggctcatgaacagaattagtgttcttagaaaaaagaccccagagagagcccccgccctcgcgctgcctatgaagaaggggtccacagccgacctcgaatctgctggagccttgatcttggacttccagcctccagcacgggaggaacacacttctgctgctgaaaccacccagtctgtggtatcctattacagcatcctggggagactaagaggaaaagaaaaagccctatgcctctgccctgtaaaatgtcagtaatttccttgggccccacttccgacgttcaccctcttgtgggtgacttctgccggctggccttggctctcactccacggtaactgccctcccagcttggcccaccagctctcctgtccccttccacagcatcaaatccacactgagtgcccaagggcagcaccctccaaaatcccccactcaggaaaaaggagcagaaccaagcccaaaacaggtggacgaggagggctccattcaggccacgtggtggagggggagggctgggaggttcctgaagaaagtgcgtgtgtgtgtgagtgtgtgcccgtggtgtgggtgtgcacggtgtgtgttccatgtatatgtaagtggtgtgtgtggtatgtatgtgtgtgtggtgtgtgtatatgttatgtgtgtggtgcgtgtatatgtatgtgtgtggtgtgtgcgtgtatgtgatatgtgcatgcacgtgatgtgtgcatgcacacatgtgaagtagagaggacaaagcacacaggtggcaggcgcgggtcatcagggctcgtcgtgacaccctggaaaatcacacaggtgtacatgagccctgaacagagagaaaggaaaagtggatgggaaattgtggtgggaggaacagaaagggcagaaattttataaagggaagaagggtaaagggggcgagtgaggtgggacgggtggtgcacctcctctaagaccacggggagcctccccagcctcctgcagaagccactgcacctccggcccccaccacaccctgcccaggtccctatcaaaggcccccaaagaagaaaacaccactctgctttctgccccagtcacgccagcgtgctgttcctcacgtttgctggaagtccccccgtggtatgttcctctgccctgacaggcaggacacctgtggagccacggtctcctgtgaagaaatgcaggttccacgtgcagaggcggaagcaaggaggcctccagccgcccggaacctctgctcccagggctcctgatgtgtggtccaggcaggacagggcacacccgtttacccagggcctctacattcagattcagggcagggcacccagcccctcctcccaatcaggaggcagaacccaacacctgccacccacatcagccccgtcaggatgattaatgacgttgcatccataaaactccaagaacctggagacagggtgctgcctcccaaagccctgactcagaaaaacacacagcatttccagcccgcgtggtgaggagacagtcagtgtgggaacaagatccaccgaggtgcctcttgcccttgcccaggacatatcgatgagactggggagccccacatggggacacagagagtcaaacagcgacaaacagtttcacactcatggagatgtgtcctttaacattctggagtcttgtacgtggaagtgagaagggggaggtgaggaggcacagttgtccatggacatttctcaaagcaccaacatttccaaatcgggaaaaacctgacgtcaaacagggaaatggaatttggaggcgtaaatcatgggccaccgcacctgagcggctgcctgagcttttggggcctgcgaatgaccgttcggtttgcccttccctgccccctgcagatcaatttcttcccattggacatccattctcgcagccgtgccttctccctccctggaggtcttagcagagtgttcacttgggggttcagttgtgctattactggctagcatcttccatcatgaacctgtagggcaggctccaggactgccgctggccactacccaggcccacgggtacagcaggagcccacaggacaaggaggcactgggatgagtggacattggttctccagctcaaggaatttactggctctactatagacagatgtcattcctttaccaatcttctagggaaaaccacttcaaaatcaagcatgtcaccacatgccacagacttgggtactcaagtcttagggttgtggatttctcacctaggagggcaaattaacctaaggccctaacatgctacagcgggacgcccacagaaaattctctggttaagtcctcaagctctagcaagacgtgtgtaagaaattcacatctatcattcattaccttcaggtatttgtccaaatatctaataaaggagaaaccgtaccaagggtctttaacccttctgatttcactacagctttttagaaattagccaggaatcactgttagcttctcgtgtcagattctcatgtgaggaaatccagaatcattgaatttggggccagttagcattaaactcataaaactatgtgacgaaccaaagctaagctatatgaagtatacttttaccatgtttaatggatttgccaaaggaagaaaaatctgacaaaggggcaccacgtccccagagccatctggtttgctcgttaactctgactaattcttcctttgtttaattgcacattgtgctaaaccacttcacaaggatgaaggtctgttaataccatttttgagcgtgcagttctccacacccacactacctaattatctagcatcacaacttgctgtctagaaacgtgtttgaatgctcaaaatattctaccaacaaacaggaggaaaatcccattgcccagttttcatttgtcagggtttgttttatgttaagtctttgatcttgaattaaaatatacactctcattttgctcccctgaaaagaaagctattttcctgccagccaatgttttgtcaagatcatatttacaaaaaaatattttttcccataaatagtcgggacagaggctgccggtgctgggccacaccaatgacagcctgtactcctggagagtgctctgggctttaaaagtcatggcatgtgatctgccattcgagatacttcattttctgctgctccttctgaacttggaaacagaatcggctccctatttttaaagctgcactagattcggtaagctccagatacagctgcaaatcaagagccatcaatttgtatgatggtctctcctgagtctaacaggtcccacagcgcatggcaaaagggcagattttacggtgggcagaactaggaagtggagctggaaacgagaatgtgcagctcactctccctgttcgggaacgggatgtgtgtgtatcagtgacgtccaaggcataggggagccagcgacgggtgggcctcgtgtgcagaataaaataaaccatttagcatagatctgcttccaggggcttttctagggtacattgttgatattttacccttgaattcaggcatatttttaaaaaaattcattgttttcaaagaactatcaaaaaagacaaaagtaggtgaatgtgggaacgcacactgatcacatggattctcacgattcctctgccagatgatgattcatgtgcggtatgtggaaataggaaataggggacatctggaaaaaaatcttggcattgcaaacgccagacaaaacacggaaaaggaaaagagaatgtattctattaacccatttagccagccaacgggaggggagggaagacaccctcgggtcctgcagatgagcctgagtgtcaaagtcagatactttggggggtggaatccattagatggcaaaaacgaagtgatatctcacgcatgttcccctttgaataatagctagaccaagcaaggctggccgatgggagggaggagtctggacgttggtaagtacacgcacattgggaaaagctgttggcaacaaaaactcgcagcggtatttggaaaagttggggagttgaagaaaaggagagtcgttttcctcacattttaaggggtaatgattccggaaatggatgataaaaccacaacgttgattagaaatttggatggaaactgcaggcagacctcccaagtgagcccatctcattttccctccaccaaaagcatccaaaagctacaaacactacctaatggccctgccaagattctcaaaacattctaacatccctttaatttaggtcctgggagcgcttctgtcacggatggaacaggtccatttctctgggtttccaggcttcacctgcggattgcaaatacttagctggatggggatccatgtctatgtctttctatccatggatctgtctagagctgagctaacaagcacattttcctcacacttattgcaacttcaaaatgcagctgctattcacatgacacgcatatgtccctacatgtgacattttaagttgcttaagtgctcttatgtacagtatcccccattcagttcttttagcaactctggggaatttccaggtcagggcataacttggtcaaaacaacttggtgaaaaacagtgggtagatgggggaacttacactagaatcaaggttttatccaccgatccactctttcacaaaggccgttcctggcttcagaaataaaaagggtcagaggctcggtacagtggctcacgcctgtcatcccagcactttgggaggccgagacagcaaatctcttgaggtcaggagttccagaccagcctggccaacatggtgaaaccctgtctctactaaaactacaaaaattagccaggtgggggggtacacgcctataatcccagctacttgggaggctgaggcgtgagaatcacttgaacccaggagatggaggttgcagtgagccgagatcgtgccactgtactccagcctgagtgacagagtgagactccatctcaaaaaagaaaaagaaaaaaacaggggggcgttcaaataagtgtggggaactgtatatgacgcagcacccacggaaggtccagatgatacactatcttattacaggctctgagacatcccagggcaaaacaacaaatgtccatttaacctgaactcagttttccccaaacgcctgtgtccttggaacctcttcccgtttccatcccggaggaaacatctgttgacatcctaaagatggtctgatgatcatattttgggaaaggctaaactagacactattgtctctcaggaatattcaaaacatgtataaacaaaggcattcaattgatctcaaaaaattagtaatctcaaatatgcttaatgcactacctaaacaaagcttatatttattttttaaatccccctagtattgtacactaaggaacactttttaatgcgttttgattttatggtatatatttcacaccttataagtaagaaaattgaatttctttttaaatagactagatttgaaattctcactaagtcaaatctggcacagtgcgtctcacatattaagtacttaataaattactgttattattaataactcaccattattagttcaaatgaatgaacttatccaaagtttcaaagagtctacacaaaaatatttgctttcatgtgcttgagtaaagaatttagtatctaagaagcataacacctttaacgtttaaaacaatggttaatataatttataggaaaaattttttaatattctgttaaaaacagcaataaaagaaagaagatgccgggcgcagtggctcacgcctgtaatcccagcactttgggaggctgaggcgggcggatcacaaggtcaggagatcgagaccttcctggctaacagggtgaaaccccgtctctactaaaaatacaaaaaaattagcctggcatggtggcgggtgcctgtagtcccagctacttgggaggctgagggaggagaatggcgtgaaccagtgaacccgggaggtggagcttgcagtgagctgagatgacgccactgcacaccagcctgggcgacagagtaagactctgtctcaaaaaaaaaaaaaagaagatatgcaagaaagataatcatacaagaaggtaattattattctttaataattactggagatgcaaatatattctacacagatactaggaataacaaggaataacaggagaagagccagtccatctatctatatggtggaatatttaaagcactctgtccttgtatattttaatttcataatgaaaacatggctaaaactatgtctattgttacccatgtgtaaattagaggaaagatcatggaaataaatatatttataaattgaagattattgaattctccaaaaatacaaataaagtacagtccctgtctcaaaaaggaatttcatctaagatttaattacaactatgaaaataccctaaatttatgatcttaggaaaaagtgagtcccataccttaaaggtaatgttagattctaaggcactttgacaattgttacaatatagcacaaaaacgactagaatgttgtagatgatgtgtttaaaaccagcatgcaagctcaagcctaaactccttatcacgtagacattgcaatgtctctggcaatgggagctaataaaaaacaatcaatgtaaaatggcacatctaattcaacagactggaaaatctgtcctcttctcttcttgtatttaggtattagatttatggtattccttacagataatatttttcttcttattttgtatgtccttgagagaaatatactaagagtgctcattttgcatctctcaaagtgcccagcaaagtaacaactgaaaaacatgcgttgattaattaatcatgtatctaaggattgacagacacaatccctctccagctctaagtagcctgtgaaaagggaaaagaagatgcctcttccagatgtggaggaggcagaggcacaagtcgatgatcctgagtcaaagagaggacgtgtgagaagcatggccatgcccacgtcctgggtaatcgcggagacacagtgaagacgaccagccttcaaacagaggaaggagctccttgtggagcggactctacaccaggatttccgaaaggcaggggctgtggggtgacccagtgctcacgctgggggtgtttctgcagacctctcacaggcctgaaacaggcttacttcaaaatgccttccccttagagaggttttattcctaatgcacagggaaaagcaatccagaatggggtgggatgcatattttgatgggctgggcacccctaacctgtctcaggaggggacaatggggcaggagtggctgctgactggctgacctgccccttgtcacacacaggggctcgctgtgggttagttgttgaaccgggctggaggcccacgttgactcctgtagaacaggaactgggaggtctgcccagggccccagaggagtaggctcatttctttgtggtcctccagcagtcctccccgtcccgacccgttagagaaaggcttcagaaggcttgctgtccttggcaggtggcctggggcgcagtgggtccgccacagagtcagtaagaggaaaggaacttgctcaagacttcggatattctgagccgtgtcttcagctggcccgactccctcagattagggtctgcttatctgaaggagtagaaactgagtcgtactctggttagtgcctgaatcctgttatttgtcttttattagctatagaagatggggttagttcagcggtattccatccagggtgagtctgcaccccccaccccccgccaggagacattcagcaacagctggagatatatttatgtcacgactgctggggtgggggtgctcctggcatccgatgtgtaaaggctgggatgctgctcgacatcctacaatggacaggacagacccacaaccaaaaattatcccactcaaactgtcaataccaccaagtggaaaaagcccgggctggttggtttcttccactgtataatagatattacaataatgtgcataaaacatactcggccccaggcctggcccaagatacagtctctttctctttcttgctctgacactcacaagccaggatttttctatcctagcctagatccgttgtgtaaaagcagcagctatagccaaatgttgagatgcagagagacaggtttatacaaaggtgtgacatggacatacaccgattgtgtcaaatatctaggcgctaaatggctggtaaagctacaaactgtttgccataacaaaagaaagggtatcctgtacaagctcagccatacacgacattaaactcttcccagatttcctgggccagcaatgaaatcacttccagactggccacagacttctccagccttttcaaatcagataagatacacattttagacagacagatagcaatgccatcttcaaagttctctgcttggaaagcagtcttggttgttctatctgatgacaatattattgcaatgcagagccaatgtggacaggagctgtgatttatagacaatctaattagtaataacaggataatgtgctgcttctctatatctttgctgaggatctgggtatcagcagggttaaagtattacaagaaggtatgagatatccacacagttgtcactactcactagaaatgctacaattctacttaattgagactctgctcacaagactgtggcttgggaatgtccctttttggagtcactatagtagaaaccgtcaaatctttgctatgacagcatttatcagctggtcccaagagctgttttctctgattaatgcagttcaattaacatgtgtcttcacatgtacgtgtgacagaagaacctagtctatatctaagcaagcctggcaaattagtgaggacatgagaggctggggtcctgctgaattggggaagctgtcccttgattttatgctccaggtcccagggatcacttccttctcagaaagacttttgtatttgttttcccaacagattctcctggaatgtgatggtttactctcgccttgttatttatgtacaccagtcttccatctctagtttaactttaaattcccttttttggacactgcagggtcacagactatggtgatagtgttatggaaacgtgggctcccaggttagattatttgaaagaggtcttgtgtaaactctattttagcaaaacataaatggttaatttccttagcatatagcagtaacttctgggaatgtgttgcctttcctactatcttaaatacttgagaaaatcaaattatcactcaaaagaagagcttaacttttggctatttctgtgaaggcaagcattcaaaaccctaatcagtacaagcagacagcattcccacactgccgcagtctctggaggagcacagagccactgtgtgcaaggccaaattaattacctaacagaaaacatctgaagatatgagtggccttccaagcaagtgggaaaataaacaactcagcaaagactctctgaaatccagtagaaacctgctgaatttaactgttgaactcagatcaagctatctagtatttattgattacttgaaaactatgagattataacgccagcaatgatctgttgcactaaaatgtatttatagtatctacagaatataagacattttgtccattctgtcatatcgccatagaaagcagaacttagtcaaaagagatttgtactggagatattccagtttctgttgaggatactgatggtttgcaaataatagtgtcaaagtgctcctcaaagagacgtgggaaaatatgtcttagaagtaataatttccaaatttctaaggctgtgacattctgacccagcttggtaactttaactgcatctcagctgtgcctcctactgtcctgtttaaagaacaaccaatcaaaatcaatttaatgtgtagacatttgagaatatcaaaataatttctatgaggatagaaggcgttcagttgcagctcataagcagactagtgatctaaaccagtagatttgtattccattattccaacccctttagtcattttgtttttacactaggtcggcatttctagggctgggacgctctgaatatgcagaaggtggcaggaagtgcagaaggtagaaggtggcagccactgaggaagatccacttcttctcttgacctgccagcctagagtacatttctttcttagctgactttgggatgagagaaagggaaccagatcggaaaccctagctcagtgaagctgaggcatttcacatcattaaattgattattttaacaggacttccaagacaataaggggaagtttgtttaaaatttcctctgtcagtgggaggaagggctctttccccttctcaatgctgtgtgaaccataggacctgaaatgtttatgctcaagatgagaaaaaaatagaccttctccatttttgttaaaatgatataatactaaaccatttagctattgtcctaggcctagacttcaagaggtcttctgaatccattcaatcatcattgccttttaaatcacaaattcagaatggtctaaggtagagcttgctagcattttattttaaatgttctttatggaattaaaaaaaattaaaaaaaaacagtaagaaccccaaagttggcaatggagaaacaggagtgtagaggagcaggtcaggccaaaaaagtcctggaggtgctgggctccctggcctaggtcccttggtgggaaacctggctaaggccacacaaggaggggagcaggatcctgctccttccatcccagtcctggcccgggctctgctgactcccagtgtcaaggctaaagctggcccctgtaggaagctggcatggagcctccctcgggacacaacttccacgtggccccacacttctctgccttcctgtcctaagcagggcgcaagccccacgcaggctccaagccaggacaggcacagacctcgcctggccagagggggccacccccagcaagggctcctccttgggcaatgttgagatgaaatgttggcggcccctttccttcaggccaggtgctggacaccgcctcccctgccttccccacacatgtgtagcccactcggagtggaagcggcttggctctgaggggtgttaccaggttgtggagatgtcagttgacaggtagggaaggctacaccctatcattctcccttgtcatgttttgatgagtggatttttgggaaaaactgaaataaattacgttaaaaaagttacaagttttttggtttttggtttttggttttgagttagagccttgctctgtcgcctaggctagagtgcaatggtgtgttcttggctcactgcaacctccgcctcctgggttcaagcaattctcctgtctcaacctcctgagcagctgggactagaggtgtgtgccaccacgctgggctaatttttgtacttttagtagagactgagtttcaccgtgttggccaggatggtctcaaactcctgacttccagtgatcctcctgcctcagcctcccaaactgctaggattacaggcgtgacccaccatgcctggcctaaaaaatatatataagtttatagatgcggatagaataagaaagtatgtaaagctccagagccaggaggggccgccaaggcctgccggctggacagaagcaaatggaaatggaggtggacatcaaccctgctgtccctaggagggagcagggccaacttggctccagccctgctgctttcaaagtcacatggaaaacagaggtaatcatgatccaggccttaattcctctttgttgggaccccaaagttctccattttatcattttaaggacatttttatgagtttggtgaactcacttgtatatttcaagttaggtttttaacaaaatgtctgtggcatgagaaacacttgcgtctactttaaaataactcttgagcatgcacactggaaatcgctagaaaaatccaaagtaagagagcagagcatgaagataaattagagttgatatgaaaagatgtgaaactttccttacatactccattcattcaaaaactatccaggtaacactagtgccatcacctatcaggcatattttttaaaataataatgttggcatttcagcaaatagtcaaaaagaaaccacagaattttctgtaaactagaatttgctgaatttcgaaagcatcagtctgtggccccataaaacctctggcatgccggggagggaagtaagaattcacacgctagccagaatgacaccttcagctttctggaaacagtatcctacagagtatccactccattctacagggtcccaacctgctgtgcgcacctgcaccaaaggctgagtggcttaaggtggtggcatttcctcacagccacacctggtttccacggtgacccacagacagtaccaggatgctgcactgttttctggataaaaaaacagccaggcaccctctttccaaccaactgaaatgcacagattcaacttgccttccagagaaacttatctttatctggagccctggttcttaaatgaaagggaggggaacagtttgcttgcaaagaaatacattttaattttacatttgggaaacactaagtttcccaagcaatatttttataaataaatctagacaagcatgtgatggattaaaagatggtttaaaaatactaatttgaagagaaggtcctcaagtagaataggaactagtttctttttccggaaaaatgttaaaattagttcttatacatcaattcgaaaaagtacgatagattcaacagattttctaccaagagtcaaaaaggaaaataaaccaaatatgtttttctacattaattgccacatactattacattctttggagaagagctattataataatattactactcagaagtaatgtcaagcctggtttggcttcatttgtattgctctggggaaattatcaaaacagtaataaggctttcacctgaattgctgattattcggttactgttaatgtagtacttactgtccaattcacaaagaaatgttgtgatttaaatttcggcaactcaccttttgtcccttcactccatggcagtcacatttgccacagccagagccagcacagccaccctggaaggaaaagaaaacttctttaaatagaagaacactttcaaagcgagggcactatgcaaatggagatggttctggcatcttgacttgtttatgagcgaagcctgccctgtccttcggacacaatcttatctgcactggttttcatggggctgtcatgcagttccacttagggtgcagatcccctgcccaaatagataaaaaaaaatccttgagtagaacaaatcccaagtgttactcagcccaaaaagtgaacaatgtcacctatactttttgccctttgttaatttctatttgaagttgactccctcggggattagtttaacagggcaacacccatatttgcaaagctacccaaatgtcatgcttcttatttagaggtgtcagacctaagaccgtggaggctgagagctcccaatgacgtggtctcaaggacacacggccgcgcaaaaaaaagtttgtacagaacagaataaaggaatgagctgatttttaagccccaatcttaaagaactcctttttgaattcaattaaagcttgaacgtcacattaaagaacagtcaacaacaaaatattcttgtagttcacttttttttttttaagacaaagtgttgcttttgttgcccaggctggagtgcaatggcgtgatcttggcacactgcaacctccacctctccagttcaagtgattctccttcctcagcatcccaagtagctggtaatacaggcatccgccaccacacccagctaattttttgtgtttttagtagagatggggtttcatcatgttgaccaggctggtctcgaactcctgacctcatgtgatccacccgcctcagcctcccaaagtgctgggattataggcatgagacactgtgcccagcctgtagttcacttctaacataaaaattaacttttaaaatggaaggaaatgaatccaagcctgtgataaaagctggaaaggaagcaagctaccacgtgttcaaacgcttaccaggtgccacgcacagtcagcgatcatcttatttaatgatcataacaagcatttcaagataggtagtgccatccccatttacagatgtggaaactgaattagaagatttattataacacgctaggacaaagttgaaattagaacccaacttcaatttccattatgtaaaattgtcatcacatgaaaagatagaaatacgtcggtacatacacgcacttgcaatttccttagaagaatcccaattttaaaccatgacagacacaggtattgtggacagaatgtaaagaggtatgagatgaataatcgggttaataagctttattagaggctctgctttaagtctgatataaaatgtttacttatattctacttcaggtgattatcatttcctgaaaataaaatcatgccactaatagtattgtgatcatgcaaagtgtatatttttaacaacatattccagcctcagctgcattgccatggagacgcctgcataaaacaatcacatctggagatatttattttgtaaagctaaatctgaacaagtgcctccaagacagtaagctgttctcaattttatattttggaaatggggacagctgacaacagtccaaaaaaactccagagatgataggtctgtgtttttctctgactcacattttaggcaattttcagcctacactctcataacctcctaacattttaaatcaatccatgtgcacagatttgcttcataatctgggttttggtgaccactcagaggcatccaaagagatgaggccaaaatctgtaacctgtgctccaggaggttcttccaaaatggacaaataccagtactgagagacctcaccagaggtacctaactcagccagtactaccatgtgtctaatccccaggtgagggtcacctgctccctacctggctcctgcgaattgctgactgcatgtctctattgtcaggcttatcacgtttctcgttgtttacttctgtgtctccccggtacaccctgagtgctttggaggcagcctcacatacagctcacaccaggctcccgtagcattgagcctgatgtgagctgtacttcatctaagacgacaccaattgtaaaacccatactaagaaatcaagaagggtactaattaaacaatgacacattatcaattgttagatctatcccaattccagagttgttaaaacatcaataaatgcacatcttagaattgatgaaatcagtacccaattatggttgtattcttggtgctgttactggtgttacccatctaagcaaccttaagtaacaactgtagatggaaatccagtggcaccgcgcacctcaaccacagtgcattcgtgcacaacagcactgtgggacaaagctccaaacagggaactcggcaatgattacctgactgctccagatcacagagtagccagggaagagccggggactctggggagtgcgctggcatctggcacctgacacctggagccgtccagaccagctattccatcaccaggtcatctccaagtccctggagtttcggggcagcctctttgctgggattatgccactgcccacaacctgtttgcgtttgagccaagtttggaaacacatctctgttctttaaactctgcagtgtttcatccccctcctacagataccaaaaggaaaacccaccaggctaagtctcatgtatctgcagagtccatttaggaaatgtccagcagtcatctgggcttagctggcagaaactcaacaccagcctgaagtagtgtggattttcgacttgtgagtcaattgctgctttctgggaaagagcagattaagcagggatttaagggattgaagctgaaaatggctatttggtgatctggagttttctgaaaggttgataaaatctcagaagctttatctttctgcaatttgagggaggttataaaaatgaatttcctggaactgggcccttaagccatccgtgaatgcttccattgcctgggactgcagataagaggctgcaaggctgtgactgtggaccctcgggtcaagacgcttcttgtgcttttggtacagaaacacccccagccggtgccggtgacaggcgggtgggtagttttaccctggggaccacttcaggtactaaggaacactggggaaaatcagagatgagacaggactgacccccgaccccggccttcccccaccaccttacgctttttcataagcaagtaattttttttaatcctggaccaaaaacatgcatggctttatgtgtgtagggaatttgattatcaattctaaaaaattgatcattccaaaaatatctaaattagggttagcttttcagaacaaaagatgtctaagatcatgatttttgtgtcacattctgggtggcctagcattttatgtaaatggttttgttaaaaaaaaaaaacaaaaaagctagcctttagaatgacaagaatgacaaacaaatatcctaagatgtatgtttactttgttaaataaaatctattttaaaatatcactattctggtcctttctgtcatataagggcccgtgctgggtttcaccctggcatatgaaggtattttagctgcagttcaatggttcactgctaaaaagaaaaaaaaaatacaaaggatgacctgagtacccccttcactcaggtgtaatgtataagcttcaaatggtgaattaaaataaaagtcaggtaatgcaagtcttaattcactgttgtaaattactgtgtttaaaaggggtacataaataatgcaggttacccaggttcacaatttcattggtgacctgacatgtgaaaagctatgtcaccatttcatcatttcctgaggaaatacaccttgcatctggactcccagaaaaatctaaagctatatgcagactggtggactccaccggctccctgctggctgcatatctgagggcctttatgagggctctgcattctcccggtgtctggatgaccctacagataagctcccataccatctgtttcagattctagaatgggaagaactggtacattctgtgcggtactcatcctcttcctggttttcccctcattggtgttctagggtcaatgagttccaagttcctggagcaatgcctgtgttgtgctcctgtgaggcacacacttaacccgagtggtcatgaggatgaaagtgggtcacgaaggcagtctccacttggaagacggggaatatggctgggagttctcaaaggaaagaaaggcgggggtctcggtctctcttataaaagcagaccagccatggacaacagcaacacaggtaccccagaccaatgtggaaaaagaggaccctagaaagctcttggggttgggggtgaatttattatttatactcctaaaactgtagacaaacttaatgaaaaccaagtcagttttgaaagtccttttagcctcttccccatagaccatgtggcctacagagtataataagttgtctccaaatggaagccaaactgacttaactgtgtttgaaacagaaaagaaaataataataatagtccccagtggactctgtcagacacacacacgcacacataacttcaatagcagagatcagctttaaacgaaaacaaaaaatacaatatgaaaggaatgcaaaaggtactacaaagtaatccctaaaccaaatatcttttatattctctaaaagtctcttaaacttttcaggatatgttaaaataattaatactgtgaaacttttctttcatgctccaattaagatattcagagatccaccatcagtattcacgttataaagtatattaagttcttaaaatacacaaagattttacaatacacagtacgagtgccaaagaagaaaggggaggaagagaagtcaatggttttaataagaaataaagcctatttctggttttctcgcatctacagaccaagagggcgctcttctcaagattacagtgaattccattccagaggatgcaaaaagaggaaagctcactcattctgtttacagaatgcctttttaactgaaccgaagaataccagctgctatgctactcgtgtgtgtgtgtgtgtgtgtgtgtgtgtgtgtgtgtgtgtgtgtggcagagagagagggagggagggagggaggggagaagggtgcagtgttatacagtttaactgggacatgtcttctgatgaaggcatatttggaatgagttaaacaggatgaggtcctcaattttctgattttttttcctgcttttgatggaagatagacctttaacatcgcagctttcacaatttttatgtgtttcacatcccaccaaatagggacatgtggagatctgccaagtctaaacagcttatctttcaaattctttctcgcattccctatgctgtgcaaaaatgtcaaaatactttcctggtgatactgccgtcgagggctcttcctggttgcagcacttcctcggggagtcttttaaataattccctacccaactaaataagcgtatggaggcaagagactgtatcttagggctacttgggcagaattaagagtacgcagcaagcgcgggccccacacgctcccggcgggattgcgagcgggacattcccaaccctctggaaggcgctcagccgcctccgctgtagctgggccctggcccctggccccggctccttcccccaaattccactcccagggataagccccacggccacacggcaggggcgcactggtacgttgctccaactgaggcaagttggacaaaaccccattgaccttcatcacgtcctgctggggtctcgctctgtggcgcaggctggagtgcactggcgcgacgtcggctcaccgcaacctctgccatctggattcaagcgattctcctgcctcagcctcccgagtggctgggactacaggcacgggccaccacgccaggataatttttttgtatttttagtagagatgggatttcgccatgttggccaggctggttcgaactcctggcctcaagtgatccacacgcctcagcctcccaaaacgctgggattacaggtgtgagccaccgcacccggcctcaattctattattttaaattccacttcattcacacacacaaaatgctggtgtggtgaataaaagataaccacacacagatgcagcaggcactcacacttttttcggatagcgaaacctcaaagactgcacgtggagaatggactttctagcttctgtcctgtttgccgctgtgctgcttgtgtcacgcttgttttaaccgcggtggctgtgaggctctgcaaaatggctctccccagctccatggacccccagggcccaagaatgccctaaaaaagaatcttaaaacttctccagagagagcacactctgtatgatcccatcatatgaaattcaagaacggaggcatctgtctatggggaaaagaagtcagaattgtgatgaccttctgcgggggtgtggcaaaggtagggacaagggaggtttctggggtgcaggaaacattctttgcttgttgcgggcggtgactacacgggtgtatacgtcggtaaaaactcatcgagctgtgcacttgtgatgtttgcactttgttgtatttcaataaaattcgagaaaaagggacgtgcttaagcctgttcacagcagcactatccacaatcgccccagctggaaacagttcaagggactgagaaacgatggggtatattcacggaagggagtccccggccacaccagggcaggccagctacagcacccgcagcaagctgaagcaggcacaaaagaagacaaactgggtgactccattcctgtaaaagtcaaagccgaacaagatgacgttggatcctggttactcgtgagggctactgactagaagaggactccagggacttcgtgccttctggtaatgttctggtccgtagtctgggttcactgctatgttcactttggggaaaatgcactgagctgtacccttcgcctttgatatgtttctgtaagttgataaacttcaataaaattagctccccaaaaaagtgtccatggcatttaaaaattacttaaaaaacagtaaaatataggccaaatgttgtagtacaaataatgatttcttaaaagcttacatttgcataacatttttcaacttccaaaaatatacttagtattgtggttttaaaggtaaaattaacttctctcccttattctcacagaactcaaaatcattgtgctttcatctgcatttgttttattatcatcatcatttgttttgactaatgtaagatagatgtgatcccaaagatgtgaaaataattattcatcattaactcccctgaaaggacaacttaggtaaataaaataatatttctgttccatttaataatggaagacatagaaacaaaacagtccctactactgtttagagttacacaatatttctgccctaatttgaaaacaacaagagttgatacattcttggcaaaaaaaaaaaaaagcacaaaaaatgtgagaaacagtgaatttctaatatgtaacatgtctctctctgtgctgtagtatgactaagatttgtacatgtgaggtacatgctctattctgcttctcaattagagactgagtttgcagggcagaaaggctcccaagaaaccacacgccttgaggaaatgagggtgttttcttggcttctcttaggaacaacatgtgactaaagttctggtctcattttccctgtcatataattttgttgactcatgtttcacttcttttcttccctttttcccactaaacgggggtggacattaaatgttcctgcttggggaataggatggcctggagggaatgaccatgaagaccggcacttcacctccaggtcattggtctttgtccagctgcaagcagatgtgagtatgattagttgccatgggtcagtggttccttggatggctgtgtgtgaaatgagttggtgggcttcgtgtgtgtctgctgggacccatgggtggaaacactgttgggaggcatgacctggggcgagccttcccgtgcttgtgagtcactggcctgacgcactagcacagtggggcaaggccagtgcgtccccagcatccgggtcccacggagcccctcccaaaccaagtgtcagctccaggcaaatatgtagacttgagagacatttcgttctctcaatgaaactcaaactccctaattccagagaaggaatctcccacccatagagttgtcactcttagctactcttcccggttccccggattcttttcccaccagccctgctcccatcctttgtaactttcatctttaaccccttcattccaccagtgcctattttacaggcaccctttgaagaacagcaaattttacccagacaggcacgaaaaaagacgttggactatttcttccagctttggagaactgtgcggctcccggctgtgctgaagggcagggagttctcccagctattcccggttttcatcttccatggcctactccttccacaccctggtgccaccctggcctgcaccggccatgtgggcttctgccttcactttcaacatctgactcccaagcccagcccacgcaagacagccccaaggccccatgcccaagactagggtgagtgggtggggcaggggaagcaccagcaggcctgtgccaggcactccttcacagctcctggcagtgcccagtcatacttatctttttcttaacaggtggtgagattcacttcccatctactgcacgcctgcatgggccaggcaccccccagtgctaagaatacagagctgagtgtgtgagcaagctggataaggaaaggtgaaattacaataaaacgtgggctgcaagggaggtgagcagagactcacgggcatgccagagggggactcggggacccccaaggtagggcacacttcagctgagttgcgaaaagtcagggctgttcacctaggaagaacccaggatgagggaaagacggcgagaacaggctgccagacaggcacaggtgcaagccggtacagaattaagacagcacattcctgaggcagacaggagtttaacttttcagatcttggccgcacagcctgagagcataaagaccttgaacccacacctgacttacagcagaggcacagtcttctccgccttaattctccttagtcccagtaacactgactctgataaaggagtctataattgctgtctgaaaagtgatagcacatttacgggaagacttacagaaattccaacaactgggcataagtgtcttctttattaattcctaatcataaataaattacttttttttgaggtagagtctcgctctgttgcccaggctggagtgctgtggcgcgatctcaactcactgcaacctccctctcccgggttcaggcaattctcctgtctcagcctcccaagtagctgggattacaggtgcctgccaccatgcctggctgatttttctatttttagtagagacgtggtttcaccatgttggccaggctggtctcgaactcctgacctcaggtgaaccacccacctcagcctcccgaagcactgggattagaggtgtgagccaccactcccagccaaataaattacattttaatctattccatctacaatctccaaatttataataacatttaattttaaagcatgtttctacacatagttatatgtgtatatgtattatatatgtataattatacgtatatgtattatatacatataattatatgtattatatatacgtataattatacgtatatatgtattatatatacgtataattatacgtatatatgtattatatatacgtataattatacgtatatatgtattatatacgtataattatacgtatatatgtattatatatgtataattgtatatattatatatacttatatacaaaatgtatatatgtatatatacatataatatgtatatatacatataattatatgtatatatgtattatacatataattataagtatgtatgtattatacatataattatatgtatgtatcatataaacatataattataagtatgtattacatatacagataactataagtacgtatgtattacatatacagataactataagtacgtatgtattacatatacagataactataagtacgtatgtattacatatacagataactataagtacgtatgtattacatatacagataactataagtacgtatgtattacatatacagataactataagtacgtatgtattacatatacagataactataagtacgtatgtattacatatacatataactataagtacgtatgtattacatatacatataactataagtacgtatgtattacatatacatataactatatgtacgtatgtattatatatacatataactatatgtacgtattatatatacatataactatatgtacgtatgtattatatatacatataactatatgtatgtatgtattatatatacatataattaggtatatatacatataattaggtatatatacatataattatatgtattacatatacatataattatatgtattacatatacatataattatatgtattacatatacatataattatatgtattacatatacatataattatatgtattacatatacatataattatatgtattacatatacatataattatatgtattacatatacatataattatatgtattacatatacatataattatatgtattatatatacatataattatacgtattacatatacatataattataagtatatatgtattacatatacatataattatacgtatgtatgtattacatatgcatataattatacgtatgtatgtattacatatacttataattatatatgtatgtatgtattacatatacgtataattatatgtgtatgtatgtattacatatacatataattatacgtatgtattacatatacgtataattatacgtatgtatgtattacatatacatataattatacgtatgtatgtattatatatacgtataattatacgtatatatgtataattatacgtatgtatgtattatatatacgtataattatacgtatatatgtatgtgtgtgtgtatatatataaagtataatgtgctgtcttcatgcccatcaacatgattaattggagtaggagaaggtttgtaaaagaaatgcgctacaggttgaatattcctaaccccaaaatccaaaatacaaaatgctccaaaatataaaactttttgagcgccaacatgataccacacatggaaaactccatgccctctgaccccacccacaacctttactgcactcagccttcagaagaactcccaactgggtctaggtttgaaaccagaggatcacttagctcctaacagaggatcacttagctcctatcagaggatgacttagccaacagctgctgtctatccctctgtggtccaggaagtgcactgcatattgtcacattaagcgagaaattccaaacaaatggtctagcttaatgccatgatccataggtttactggacggctagcaagagggagtatgcagatagttttcccatcaacagaactctctttgaagcatatcatgagggctccgtttgcctctgggaagtgatacacagcacagaagcgggagggtggctttgctctgaggaagacacagcagcgcccatgttctatttatcccactgcgttccaccagctgaccctttaaggagccctacagtttgtaacatactttaaaaggaaacatgaaaagcctaagtgactagtgaaatatttcaagcatgacggacatgcaactcaaaaacagagtttagtaaaaccagtggtggcagtaggaccactttttttccttaaacaattaaatattttaaatcattgctgattttgtgctcatcttctcccccagaatagcgacatcactaatctcttccagtggagatttggaatgtaacccaaattatatgacctcctgccattctctgtgtgtccccatcctaaaaagataaattcctcttctaaaaagcagacttaggtaagccctccttttccacagaactggggaatatgcaactgaacaggcctgctactcttactcacttggtagcaatttaatgagcacttactatgtgcttgccactgtacttgcaatctggagggtgaaggatgacttagacatgagctgtgttctcaaggagcttgctggttaagaggagagaagctgtggcccctaccacgctaagcccattacaaggaaggtggctggacaagccagcaggagcacacttcccgcggaggaggtctgtgtgccagcagaacagcccaggtgtcggcttcagccctgcacagggctgcctgaaggccagagtgctgcaaggacactggtggggcagctgcctgtgcccacaaaaggccaagtgttttccacctcattttctagcaggccttgggtagggtctaaaagtttagagatgagggagacctatcccattcgctggattttggtggcattcatctgtgagacttgtgtcaagtgtattagcatgaggagggaagggaaatgaggagacttgcaaggacgtccttgcccttggggatgggagctagagcagggcagccgcaagaaggcgggagaagagtgcaagggagggaggcaggtcatggctcaaggaccaattcagtgtcatgaggggaagacaggaggtttcccaatgaaagaacggtgattccaccaggaacagggggaaaggagggaaaggaagggaagggggcaggcaggaagggagggggcaggcaggcaggaagggaagggggcaggcaggaagggagggggcaggcaggcaggaagggaagggggcaggcaggaagggagggggcaggcaggcaggaagggaagggggaaggcaggaagggagggggaagggggaaggcaggaagggagggggaaggcaggaagggaagggggaaggcaggaagggaagggggaaggcaggaagggaagggggaaggcaggaagggaagggggaaggcaggaagggaagggggaaggcaggaagggagggggaaggcaggaagggagggggaaggcaggaagggagggggaaggcaggaagggagggggaaggcaggaagggagggggaaggaggcagaggaaagaaaagactgtgactgaccttatcttatgacaggagaaggtaataggtctcattttcttagctggtaattctactgtcaattagacaaattttatgtgaagatttttattctacaaatcacgctgtatatctcatgttcttcttatctattaaatcatacctaactgttttaaaatcttgcctaacatttcagcctcctccccatgaaatctccggctagagacaagacacctatataatgtttaagatgttcaagagttgtcctgggccccaagcgacagggtgaatagggcgtggtttctaccttcgggcatattctagtccggggggaaaaacacatcaaaaaaactaaatgactccacaggatgattgcaacaaacctacaagatgctggagaaggaaaaatggttttggacgaggatgatactcgggaggaagaggtgaagacagcagaggaggatggccacttgctgagtggtgctgccctgtcaggaaccagcaggcactgtgaacgtgcatcctcgagggagcaggtgaactggacctcagagcccagaaccacagggaggatgtcagtgcccgggaaagcaaaggaggaaattccagaaagagaaagcaagggaaccaaatatggaaatgagaacgtgcacagggagtttgaagaacattgggaagtttaaagagggttgaagccctggtgtatttacaggtgcaactggaaatgcggaggtcggccatggggtgaggggtttgcatccactttaacccagctacactctattcatgccccagaccggcggcgggggggtctatccgatactttcagcaacaaggatagcaaatagatattctttcctgtgggataggatctaaccacgcactcactatgcattcaacaaatgcattctattgattaatttaatattacttccatttcacagagggactattaaatagtctctatgatagcaatcatagctgttcatctcttttgtcagacaccagacatgtctttaaaaaaatcttcatgtttagactaatcccagccagccagaatgaaactaaagtgtagttttcataactgcactcacttgcaaagccacttttcaaaaataaatggaagaatttatactacttataaaagatagattctgaaatgctgctgcacagttcccaaaacccaaagaaatcactcttgaaaacatcaccttctaaggataatattatctgatttgtatctttaaaaccaggtttgaaaactcaaacataatgtaaatagaaactgcacataacaaaccctacagaataacgaacatgtggaagagatcctgcggcaaaccttctctgcatttgacaagtggtcagagatccatctgggagacttccatgcgacatccttccaaggccatgagcaaatgtgagcacaacagcaactaaaactctccataagaatatggaagataacggctggtaaaccaaaaatgctactctgcaaaccgtaagtgctacttccaaaggacctacctaaaagcacaagtacatttgtggttaaagaagaaaaactgaggtataccacagagaaaagttgaacttttgctggtcaaagccatggtctctcaatgacatacactggtatttgaacagtggcagagggtgccaagagctatctctccaggaccctgtgagacactgtggttaactgtacaaggtcagtgcatgttgaggcctcctttccaaaccacacttccccactataaccctgagaggggagtctcactcttaagacatgaaaaaagagaatacataaatagagtttaccagcaactcttgaagccaaatggtctaattaattgacaagcgtaatgctatgtagctattgaaatgtgctacaacttcaggaactcttgccttttccaaaggaacctaagaagaatatttagcagccttaaaccattcataatttattataaaaataaataagaaatacataaaatatggaaaatataattcattccatgtccctggtccttccatttgaatgagtaatacacaaatagccctcgtttctttcttttctcactgacattcattgaatacttattttcccattgcctacagtgcatacaatacaacaaggctatgagatttgtagaaatagaaatatggttcctaaagacaaagaacttgtattaagcatgttaacatccagaaaattctagaaaaccttttgctaccacatactgtgaagcttaaatgagcagaagtcacgtggagccaaagtgaaccgggcagcactcaagaaaataaaatttaagccggcgcagtggctcatgcctgtaatcccagcactttgggaggccaaggcgggcagatcgcatgagctcaggagttcgagaccagcctggccaatatggtaaaatcccatctctactaaaaaaatacaaaaattagccaggcgtggtggcgcacgcctgtagtcccagatactcgggcggctaaggcaggagaatcgcttgaacccaggagccagaggttgcagtgagccaagatcatgccactgcacaccagcctgggtgacagagtgagacttcatctcaaaaaaaaagaaaagaaaatttaaatggtaataaatattttgaatttgaaaatgtatttccatctatttacaccaactatgtgcctctttattaaaaaatagtcaatctgaaattgccaggtgatataaatgataatttaataaataaggtaataaacaatgttaactttttggttgttgctttgacttcaatttcggtttaactagagctcttggtagtcttactatgcaaagaagctgatacactgtagttcccacaatatatatattttaaatccttaaatcattaaatatcttcaaaaaataagttcagcatagttttaatattagatgtctttcattgcatttcatagcattaaaagtggaaaatacatgtatgatagatatatgcagccttgatctgtcaccaaaatatttatttaacctgaggatctcattcaccggcgatcctgagcaacctatgggatcctttgcggatgcaaagacttcagatgacacggggccgcccggtccctggagtgaggcccttggcttccaaagccatttctgacgcgtgcgccctttgctcagttttcagaaccacactcaatggttttttccatcttgttaatttgcacattttacctttttaaggcaatactctccagaccttgttttcttttcaaaaagtcaccatttcctcctcttccgtctagccttaattgttttatttttattttttagctcattgaccctaattaggtggttctaactcactcagtccagtgactaattgcatgattcactctccagtcaggacatatttattctaaactttgtgcaaatctgaaacaaactgaaagtatttcattaacaatactacttaaaaaaaatttttaagcgtgtctacaaaatctaggtggagcaaaacacaagatgggaaatcttattttagcctaaggaggtgaaggaatcaacattgtccatctttcctcttctgttgcactctgctgactagacaggaaactggcttaacatgaattttccttttcaaaaaccagagcgaatctttactggaacaattcactatgctgagcttattgtccagtttttggactttctggttcataaaaacaagtgaaactaaaagtgtatttttaagaacgtgtttgcaacatggtaaaatattctaatttaaaatagaaataggtcagtcaacctaatttaattatattaatttaatggtcacagaaatcagaccaagaaaggaagtgggagctaagtgctgccttctcctccgggctctgcatctgttcttgtgcaatagttgaatctgtaggtggactagtcggctgacatgcatggcatagtagggccacagccaaaatatcagcttcccagacgctcttccttctttacgtaatggatgtaaagctgcatccccgttactctgaaggctgctgtacatggatcatgctaccaggcaacctaatcttacatctctctcattcactctgaagtcaggagccattcttctatctcgtgccatctctgctccgtgccacctgtattagtctgttctcacactgctaataaagacatacccaagactgggtaatttataaagaaaaaaggtttaatgaactcacagttccacatggctggggagacctcataatcatggcagaagacaaaggaagagcaaagccacatcttacatggcggcaggctagagagcttgagcaggggaactcccatttataaaaccgtcgcaactcttgagacttattcgctaccaggagaacagtatggggtagactgcccccatgattcaattacctccacctggctgcacccttagcacgtggggattattacaatttaaggtgggatgtgggtggggatacagtgaaaccacatcacaccattacaggtaacctctccacacaggacaggcttgtgacttactgaactcatagatccctagtagtcacagccaactaaaaccaagtgtcaccacggcaagggtggtacaaaaggccatctccggcccaagctttctagagatgaagacggaatgcatgcctctcgtgctgacatacagtatgacattttttttctgtttaatgggtactgagtctcagttttgcaagaggaaaagagttctggagtggatggtggggacggtcacacaacagtatgactgtactcacagccggtgaactctacacttaaaaatggtcaaagtgggccgggcgcggtggctcacgcctgtaatcccagcactttgggaggccgaggcaggcagatcacgaggtcaggagatggagaccacggtgaaacctcgtctctactaaaaatacaaaaaattagctgggtgcggtggagggcacctgtagtcccagctactcgggaggctgaggcaggagaatggcgtgaacccgagaagtggagcttgcagtgagctgagatcgcgccactgcgctccagcctgggtgacagagcgagactccgtctcaaaaaaaaaaaaaaaaaaggccaaaatagtacattttctgttatgtgtattttaccacaattttaaaaatgtgaaaaagatttgttcaccaattccatgaactccccttacagccccaatgtggtcacagcagagctcaccacaggagaggacaagaggcagcctgctccccaggaagggggaatggagcccccacacaccgccctggcgcaggaagccccccgacccatcacaacttcacccagaagggactgcctctgatggaattccacagccaagctattagctcttgggcaattttggattctctcaaaacaacatttgaagttgcttcctttccacctctcggatttgggagcctgctaactcactggtttgctgctgcgttctcctgaagtgctaccgctgtttagatttggagagcaaaaaccccagtgctgcttctgtggcttcccagcagcccaagggctccctagcttttagatcaagtggagttcctcaaaatttaagattcaaattactgaagataagaaggaagacacagaagcgatggactgcccaggttccatccctcctagagagaactcacatcctgctgtgcccagggaaccgcacccaaggggaattcctcaagccatctggggatttgcatcagagctgagggcgcttcctgtgagctgcccaggtggagacagtgagggaagccgcgcaggggcaggggctctgccagacattgtctcctaaggacactctgcgtcctctgccaccccgggcctggtgcagtgcctgccacttgttcattcagagcttctgcaaggccagagcagagccgggacaccggctgtcccccggtgacagtgagtgactcatttcgaggccagcacacagtggctgcacagggcaggtgggcacagggcaggtgggtcccagctgtgaccgggcgggaagctgggaaacactgggtcctatttaaagggaatttagaaacatgcaggaggcccatgcttccatctgagggtttaactgggtggagtgtggtttcttcaacgccacattaggggaggaatggaaagaggaccagtgtttttgagtaccccgtgtgcagtaggagcttcagaaacagattcctgcttaacggtcaccgcaccccgagaggtgggggtcactgcctgagtcccacaggcaaggaccgcgaggtctgcaaggccaagagcttgccctgcacctgcccgccagcaagtggggggctgagaccgcccagggcaggacccagcgccctcaccctccaccatcagccttcccagtatacaacatgaaaaatgcagctactacttcaaaatgcgtctgccctcccagagtggtggtaattaaactgtccaactggaagctgacacatatttagagcaaatcagaaggcaaaagcatttttcagaagttcctttcatgtgcgtaacttaagtatgggattttaaatcttactgatcttcctcctccctcttaattctactttttatttaggcaaaaatctcacaaagatcaacaatctcggagtgcttttcatcccacattcctgctactgtacaagaagaggaagcatggcccaggcttttaacccccagggtccagagttcatacaatgggaaggaaagtgaaacaatacatgtttcagggaaacacgcatctcctgattctgctgcactgattaatcctccctgcctggaatttccagctgtcctgatctgcttcacttcgatgtgttccccaatgggtctaagtctccttcatgataaccttccagtttacggctgtattttaaaaccagtatttcatttcaagggctgcaaggagtccatcaacacttgtgccctaaaggcggctgctagcactgatcccccaaggacctcgtgagcttagaggagctcctgagtgtgtggaccagagttggacaccataaattgtgcatctgaacttggatcaagtgaaccaaatttctccagagcaggcaggtaggtctagctggctgaaccctgtccgctctccaaacatgcctggaaaactcccacgcagcagaaagcagtcaaggaactcaaagccaagaatacacagtgtatcctctccagtccaagccagagacaaaccaccccagaccaaggagagacagctgtctgcagtgaattcacgacggccttggcctccaggaatgatgtcacacccctcatgaaatacttcaaaatcaggaacggaggttcagataagacagaatacagcatgtaatcaagaagtattgggaaaaccacccaaccctttaccatgtcaagcacaaaacagattactaagataaactgagccccaccacgcccttacagacccactttgaaagatgcattaaaatgagcaagctgcgtattattcttattattattttaaaattttggcatatgggatctcgctctgttgcccaggctggagtgcagtgctgtagttgtagctcagtgcaacctcaaactcctggactcatgcgatcctcctgccccagcctcccaagaagctgggaccacaggcgtgtaccaccatgcccagctcctgtgtttatttttatcatcaaaatggaatttgatgctatcttctagacgaatgaaaaagtagattttgcctcttgtatggatagtaacagttcaccaattatatattaaatgaaaatgtaaatttaatcattaaatggcatattattttatagatcatttcttacaaacacttattagggctctcaaataaactttaaagaaatgtaagtttaggctatcaacattagggccaagtaaaaatgaattcctcattgtaaataaaggaaaacctaaaattaaacagctgaatgtttactattatttaaaaaagaaaaaagtaggccagcattttttcagagccaacacatctgtaaaaactgtatcaaaagaaaaagttcaggacatcctcatccctcgcactgcttggcaggagagggctgctgcggcagctgtgctcccagcctgctctgagacactgctttccaacacacaccccagactgcgtccccaacccctcccagccaggaatgaaggctgaacggggaggaggcattccacacccacccctcaggagtccaggttaattatttctgaggtcaaaggaccgcagactctggtccttcttcatgggagggaaagacatagactttaaggagttgcagacctcataaaatgtgtattttcagctctcagaaccctgtttgccattcccagtagaatcattcattctgtcctctggagttagctgagtcaactaacctggctgcaggttccctcttaaaactcaaacttggcaaccaccctcctaacccctacctgcgcccaaaaccaaatccaaattcccaataattcctaagaacaacagagggaggacggtagaaagataagggaaaaaaggagggaaggagaggaggagaaagaagtaaaaggttaaaataatgtatttcaatggatgcacattcaggcctcatgcttcagaatctaccaaagaatgccaactctagttccatactttaattaaatccaaaaggttttaaagaaggaaattgttttgacatgctactttggcccagtgaatcaaaagtattaaataatattctctccctctcctctctctctgtctcctccttccccgtctctttctttctccctctctttttctcctctttccttccatctctccttccttgccttcctctccccttactcaggggttgatggggggattgaaggccactggagctcctgagctgacagggccaatggcccctgcaccacgtgatcccagggcattaggctctgagatctgggacatgctttttacactttccccattgtctctcactgtgtcttaagagggctttcttcccctccttccctgttgctggatcgccaagtgctgctgcagctcagcccacctcggctctgcaagatgctgggctgtgggcgccgtcccaccatcatcgatcggccttgactgctagagaccttctcgctgccttctccattctcccttaggctccaaatgtttcaagtgatctgggaatgagtggagtgtgacctcacttcctttcagacagatgaaagaaaggataaagaaaggtagggaggtagaaaatcacagaaagaggaaagaggaaagcgccgactgcaatacgattttggtttattttccatatgcagatttcctaattctacgaaggcaatttgagtacatcacaaagccagaaaaggtgtggggtacattctaaataaagaaaagtattaaagtagtcaaaaacaagtctcacacagtgttgagcctgaggcaccctaaactacagctgtgtgcagtcgcattcatagcgcacagctcaggctgtgaacccaggagagacgacacatgtgctttcaccaggcttcacagcgcgtgagcctgggatcaggaagtgtgtgacgctgagagtcaggggagctgattctggtgacaaggacacagcccagccaactgactccacacaggtggctgcaaccccaaaccagggagctgcatgccagtcctggctttcaggaaaggagatcctatgcacatcctatgaggaaatgtggcacgtaaaacggatttgttatctacgtcactaggtgccttcctggaggcctttctgctgccagcagtcttgggtttgggagctgcccgtagaatacaatggagttcctgaagatgatgtggcagtcatcgaaattccactccagccagggccattctttatccccagcacgaatttccactgaacactagactctaagagcccgcgggaattcctgcgcatctccccagactccaccatgcctgctgggatgatgatgcctgcaagtgtgtgagggctcccagctcaaccgtctgcggtgtcgtcactgagagtcctggatggccaccacgtggagacagatgcgggtggtggcggtccccagacgcagatacagcaagcagggggactgagccagcagcccgcgcggggggtgccgcataacctaaagaatgaagtcatgccccggcctgcacccgggaaactgcacacagcgaaagatcgccactgagataaagagctgaaagctattccccaattcagctgtttcagccgtgcggtctcacaatgggctcacagacggcagcatccacacgcaccaagctccgggccagccgaagggacgcaaggggaactggcaagccaccgttctccatgtggggagacggacgtgtcacaacccgcctggagtagttccaactctgtcgccacgaatcctagctcaggaaaagcaagagaaggctgccaacccccggtcctccagccctggagtcacgctagcagaaatgtggccacggagctggatgggggtaagaaaaccttaaaactcaaaactcatctagcaaaagaacagcagcccaaagaaaggcagggcaatgtggggcctcagtatacgtcgcggagaccagatgctgacttggggaaacacacagggcagtgctaggctaactggcacagtgagcgtgcactggacatgggatataaaattgcaacaatgttacaattcctgaacttaataaaggtatcatgcttacgtaaaagaaaatccttgtccttgggtctaacgctgacatgttcaggggctaagggagatgacctttacaacttaatctcaaatggcacagcaaaaaacaagagtaatatggagaggcagtaaaaccacgaatgtggcaaaatgtaagcaattgatgactctcaagtggaaagcatgccagcgtttatttgcatacttcctgacacttttctagaaatttaatttttaatcgaaaaaatgtttaatcagggtaatgagatttgagaaaatttgaaaggaatccaaaaacttaaaaaaggcataaggcagcagagttgcactctgccagggaccagcagccaagggcaaatgtgaagcaagcctttttgagcagataaggattaatcacaaaggaaacccacagcgagggcagcggctgctgagcagagcacaaagagcacaatgagcccactggagaaaggatttccggtcacccagtgggccctgagcctccccaccatccacacaggcgaggggaaggacctcgcactatctggtgtccagggagcccctgcatgacccagtggagggaggaggggcagggagacggagctacgcacactttcagcacctccaagaaggacagagggagaacggcggaaaggatgcccaactcaagctcacaaagatgaacgtgttttttctgtcttgggtgcatcctgagttgcacagctgtcatctcagtgcctccccttctctaaagcaccttctggtggttgtacaagcagaagggcttgaggaatctttgcaaagcatccctgtgctggagcacccagaaaactccaaagagctctcagtctctggagttttccttatccaccagtaagctccccttatccaagcacccaaaacaggggctgggctctgtactcttcaggttttcagtgacacgagtgtaagaagcacttagacaaagaaaactgatctatagctggaaacaactgaaaattaacatggagtagataatagctatgataaaatttgcaatatttcaggattttcagattcaatggttcccaaataatggcattggaatagcttcaaaataagacacacaatacatgtttaatttaaaacacagtcctgtataacattgagggcaataggtaattattattatatgtatatttatatgtatatgtgtatttatgtatacataaaaaatatgtaggtcaggattttaaaccccatgaagatcctatacagagctgcacatctgttattcacagggtatgctccaaacatcatcaacacctagaacacagctgcccccctcaaaaaaaaaatacagaaaaaagaaactctctggaaagcagtggtcacaaagctcatgacatttgactccaggaggaaagtttgacagactgctgttaagcacctacagtatacaagacattcactggcctcagtcaacccctagcatataaagacaaggggccaggttcagcagggccgatgccaactgtgtcctgcctcagagcaccggcactgccagtccaaaaccaggaaaggcatatggatgacgaatggctctgcacactcctgtgatgagcactctgatgcctgtcgtgccaggctcaggagcttggacctgaatgcaaaagatggcagggatttcttgggtggggaggggagggaaagggaggtgagtatgcagaagccggcatggccagctctctgctctctttagagagaaggcaaccatcctcgccagtccaagtgagcttttaacaaaaatgtgtcgagtaaaagaatgacagtaggataacattcactgctgtgccagaaaaacttggtcatttggcttctgcagatgacttcagggtggtgtggcagggaaaatgcttttgagcttcaagcctcagttaaaatgctggccgtgccactgtgctctgctggccattggctgcatggcttgccaaggggctctacctctccaaacccgggtgccttgtccatgaccccatgtgggaatgacacctgcctcttaacacaactgggacaaggaaatcagctgacttccaggaccacacgcctggcacgtgggaggctcaacaaatctgactctgtcatccgcccatcttccagccgagggcaggtgagacacaaggaggaggggacttgtttgaagcagtgagaagtggaaaggaacccaaggaggagggagtgggaacaccaccttccagagcccagcagaggaggccaacgtgcaaaagccgaacctccgcgcacctccacacgccttgcagcaccacggcccacctcttggcgcacggagaactgatccaggctcaccacgatgacccggagccacttggaaaagtgccagctgtattgacagcatgctctactaacaaagggctgtgcataacctatttcagtaaagacatcaatggaaaaataattgtagcattttaaggaaagttccagaaaattaactcatacctagaagaaaatccatttcctgatgccagtaaaataagacttttctattctccagggctcgaagcatatgttaaaacacccttgtttatgatataatttaataatataggaaaatgtagaataagtaaactaaaaacctttataaaatcagaagcatacatatttttcctacgacatagagagaacattgtcataaaaacgctttttgaattatgctgcaagattgggcctgtagttcacaggcatgtagaaaagaaatacagaatcaaagtaatgaagtacattgggaattatgaaaatagtggtgttattttacatttatcttatgtatttatgatgatcagtgtcagaaacaagaaattataaaaattaagctgcacctggaacacactaggcatataaaagttaagctgcatctggaactgggtctctgggggctggctaggtctccacgtgtgtccagcacaggtgacatctgatggaagacgcaacacaaacggcaggcccttgccggcagggtaggtgccagctgaccacagggcgcatcccgattgcatgccctggacaccatcaacctcaagaggcctttgtatgagattctgaagtgattataccataaagatcatatttcaggtccaaaactctcaagcagaaggaaggaaacgtgttagcctcctcagctgggtgaaggggtctgaagcctcacatacagggtgaaatgtcagcaggaggctggcactgcgagaccagaaacacatacctgccgaaatggctgtgacctgatttagggagatgccagaatgaaaccagatctggtaacggactagagcgttcttctccacgcacccccagccttcaccccgcactccactccaacacaaacagctgcttgttggtttgagtttgaaatacttggtctgcatcagccagatgtcactgcagatcacctggcaagactgtgaagctgctgtgaaggctgcgaccttcttcagagaaataacaggaaagttcatctacctgaaactgacctgtgttcatcctaccatacccagtaggggcacattaacgatttccttgataaatattgtttttagtgcataacagtgcaaccttcctcttaaagttttctaatcagactacaaggaaggagaatctaaatctacatctaattaagaggagaattattcaaatgatcaaaacaatggtagaagcaagtaatttgccataaaggacccaaggttctgatgcaaatgggtaagaaaaggagataaaaggaagagctatcagtttctagtttctcttgctgttttaggcttgtattgtattatctcacttgttctcacaacaaccattgtagggttaatcattgtagggtcgtttcatggcccctttgtacactggaaggtgctgaggcttagggtggggcagatgggaacgaggtctctgacctcccaggccagtgtttccaccactccacacagcctctccaccatcaccacacacgtgccatggctgggggcactggccgaaactgtgcccttagtggagatgtccatttctctaacagcgaccatttactgcgtcaccggagaatatagccttagttaggtctagaagcaaagacaccacagtagcaatgggcatgcctagcccccctaacttagatttttgtttttccatagaagggtccagaagtcttaagagaaaggctgatttcaggggtggggcagggagagaacaaagtgagcctggaacttctgattccaggaaagcaacgacatgttcataaaatgacagcacgtgtcacaaagacacatgcgccagctggaaggagctcccaaagaacaaattggagatgatttgaaaaacaatgatggaaatggattacaattcatagaataaaaccaatcatcaagcccattctgatctaagtaaataactgaatacatgtaagcaaatgggagcaaagggaaagctcttcccttctgcagaatcccaactaacaaatgagacgggatggagacagcggcgccaaccactgaacgttgcagcaagagctgtttcaggcaagaatcctcagggatagtcacgttacggtgcaaagtaagaggagaagcaagatattcatactgtgtcaaaggccctttccacaagatacatattaggagccaaagaaaaacagtaacttcatggagagacctggtaggcaccacctgagccaaccctcagagtcccatcatcaggcattggggaaactggcatcacacacctcccaaggaggagacaacgtcagttctgtgctatttctgtcaagaacacatgacctggatttagtcatgaaacatcagataacccaggttgaagcactttctataaaataactggccaggactcgccaaggtcacccctgccagcccccgccctgacccacatacacacagaaagactgaggatgtgtttagattagaggtgaccagggcgatgtgacagctaaatgcaatatggaatcctgggctggagccgagatcagagaaagacaccgatgggacaaagggcaaaattccaaaaaggtcagtagatcagatcagagtattatcttaattttattttcctcattttcatcattgttctgtggttttgtaagacattaacatttggggaatttggatgaaagatatacgggaatactttggaacttttttctaagtctgaagttatttcaaaatttaagaattttattaactacttgaaaaatgaatcctaaatagctcatcgtatttgtggtcttcaaagccagttttacaggtacactacccaaagaattgacatattcaaggggtaagatcaggtaatatttgtcaatactcaatatcaaagtggagtacataaattaggccagaaatttctggtcatagcctctttaaaacaaaaaaagtttctccgccagaaatatcctttaaagttttactgttttaagaactgtaatgtacagcacataggtgaaaaatggctttgaactaaaagtcagacctctttttctttttcagtaactcagaaaaaatgaagtatacctacacacatttttccatagacagagaaagtaataattctgtaatttcacatagaccgtagatacgtgaacacatgaagaaggcaaatgctgactctgccttttctgcatctcacagtatatagtggactcaaaattgaagtggaaacactctcgaaattgcacacttctttctaagaaacacctcaacccacagagcaacccctaaacccttctgagcacatgcatgtagcgcagatcacctgtgggcgtggcaggtggcccatgcttgtctctctgaattctcatttcttccatcctccatcataagtcccctctaaaagaaaagggggggaactcttctcagcattgcacacatggatgttccacaatggtgacacttcgctacaaatgaaaagaagaagaaagccgggaaggccagtacctaacactagtcacttcctatttgcctaatccttttcttgccaacagtaaggtaagatgtcaacagtgagacaaggcagaagttgcttttcgctacaccctgagcaggtaaaaaggaagccacattggaatgtcacctctactatggaagtatgatgtggctgatgtcagaacgtccgacccttcacctgtcaccatcaataaggtgcccatggaaactgataagggatgctggaccccaggcatcgctcctctgtgccagatatgcccaaagggaatcctaaagcaaagggaacgttctcctccaccttctccttccttccagggaaataaatggggtgtgtgtgcacatgtgtggtaaaatttaaataagcatggttaaaattttcagagagtttttagacagtaaatggctgcctgatcatgtctcagagagcaagtgctttcagatccaactacctactgggcctttggggcattatgggcctggcaaatcactcacatgaattcagcaatgtccatttaacccttgtaactgtcggtcactgttgtgggtaccgaaatggagaaaagtggagaaggtccctgctaacgcgggatgtatattttgaaggacctaaaggtctattatgggttcgtcttgagaatcagtggaatgacctacctgtgtcaaaaaggctctgttagtggctgagtgcatcttagaccaccatccacagcattttgcagaagcttttttacctaaatcacctcattccacttgtgacaactccatccagcagtgtcgtctctatatatctcacctagtcagggaagaagtcttcagacagccgagctcgctcctaaacacacagatcctaggacagagtctgtttccaaactcagatcctacagttaactgtctggttggaaaaaaggggtttaaattgtttatggcaactgaataataaagaactaaacacctagaatttttcttctttcttctttcaaaagcataggcaccagggaatgggtataaagtctggaaaactcaccctctaattctgaggttagaagggtcattcagactgaccccagtgtccatcagtgctgcacagatgtggctcctcttttaaatgagggcaactaatcagtcaagtgaggctgaaacttgttcagggttgcagacgcgcatctgccaaaagagcattacaactgagacacactgagtgcttacactgcagtttaaagcactaaatgatcccatttcccttcctttctcactacatttcaaaaatcctgacttcagaagacagaccaaaaagatctagggcctcatcaaattaaaaatgaatttttatttaaaaatacagcgttactactgtattgtgcatttgcttatttttgataaatatttattaaatgcctataaaagataaaatgtgctaagtactaggggtaaacaggggcaaatattaaggccctgttcccaatgaacacaatacctaatgaggagacagcagtggtatgaataatgacaatatcatcagctaattattataatgggatagaagtccatggttttcttctctaatacgtcgtatgtagctcaactttaagtcaatgaaaattcaaggcaggttggaaagcaggcatcaggatacctgcagtaactccacctttaggaagccccctttcccatgagtgttattagatgttctgatctgatgcacgtataattcaaagagaaacaggtgatcaaatcaaagcacacagccctcgggaggctggtctgaacttggatctggccgcattccttgcctttggtgtgtctttgagcaagtcactaactccctacacctctcaattcctcctggtcaggtggggtcagcatcatctatcctgctgagttgaaatgatatacaatatatgtgaaaggatgcggcaggcacaccacccctggagctctctccaacctcgtcaccgttgttagacagaaatgcaatgggaggagtgtcaggaaaagaaaccaagagtggcctggctgtgcactgatagccacagtatccgctcatgagatcataacattgtataggtagcaagagcttagggatgtactaattgaacctccctgtcatgtagaacagagaactgatgtccataaagcagtgattgtgccaacgccaggccctaggagggaagctgtggccacagcaacagatggcagcactgagggactttctacttaaatgttgcagcacctcaaaggcaaaagcaaaatatgcattctctctcttccaaaaatccttgctcgcagccgtcaccttccgctcattccccaaggaagatgaccaaacattttaaacacagtaccaaaggcatgatccatgaaagaaagaattaacaagctggacttcattaacatcaaaatgttctgctctgggaaagacattcaagagaatggaaatacaagccacagaaaatatttgcaaaagatatatttgattgatagaggactgttatccaaaatatacaaagacatcttaaactcaacaataaaaagacaaacaacccaattaaaaaatgggccaaagaccttaacagacacttcactaaagaagataaacaggttgaaaataaccatatgcaaatgcgttccacataggttatggggaaaatgcaaatttaatcaatgagataccagtacacacctattaaagtggctgaaacccagaacagtgacaatactaagtgccggtgagggtgtggaacaacaaaaattctcagtcattgcgggtggggatacaagatggtgcagccactcgggaaggcagtttggcagtttctgataaaaccaaacacaccacacaatccagcaatcatgctccttgctatttacccaaatgagctgaaaacttatgtccacacgaaaccctgcacatggatgtttacagcagctttattcataactgccaacgctcgggggcaaccaccacgtctttcactaggtgaacaaacaaacaacctgtgggacatccagacaatggaatattcacactaaaaataaatgagctatcaagacgtgaacagacatggaggaacctcaaatgcatattactaagggaatgaaaccaatctgaaaagtctacataccatacgattccaactataagacaactataagagagtctggaaaatgcaaaactacggagacagcaagaggatccatagtttgccaggggtcagaggtaagggggtagggatgaataggcagaggatggaggaattttgtgggcagtaaaacaactctatgttatactataatgatggatagatgtcattatctatttgtccaaatgcatacaaagtacagcaccgagagtgaaccccagcatgaactatggacgggggatagtgacgtgtcggtgcaggttcacgcactgtagccaatgacccactctggtgcgggatgtagagatcatgggagaggccatgcgtgtgcccgagaagaggtacgtgggaactcttggtaccttctgtacaattttgctgtgaacctaaacttgctctaaaaatcaagtcaattaaaaaataaaaacctgcatgtgtaccaccccagattgcgaaacagtggaacagagcttcgtaaaacatctgcataattgttttattgttgactcaaatattttgtcattttccttccagcactggttcaataaatcactgcagatgttcatgagcctcctgttaggcccctggggaatgcgtcctggccttcaagactgattctcgttgtaccgccaaatccatctcctctgctgaggctcctctacacccggagcgtttttatacaggttgcatgggagggttccaaatttttgtaggatatttactacaaactaaatccaaatattacaggcaataattaatttctcagtatcaatttctatgcactccattaagtatgtaaatgttctgactgtaggcaaaataacattcaaaaacccctactttcagtgtggtactccacaccagccactcagaacaaatgctggccttgaacctgctctcctgctgttgtgaccagttttaattccacgactgctacgtaatccatacaacacagttcaaaactctgcagtataaagataccgggtgccttaactttggaacagagattgcaaactggtgacccgcaggccagattcgggccacagatgtaccctgtttggcctgcaccatattctagaagtttttgaatgaatattttaaaattgaggccccaggcttctgattccttcccagacctttaaaagcagggacccactgggatccttttgcagggatgtgcgttttctcacaaagctggctgctcccagttatctgcctgacctcagtagacatctgggtttttgaactccagtttagataaccaatgtatagtacgttaatcgagcttaaatgattgaaatttgcatcccaataaatcttaccatataatttatcaatacggtcctctgtagttatattccagggcataaaagcactctcttaagctatttttattggatatttctgtatcatcaatgttaacacatttcatttctgtgtagccatttctgtgaaatatcacatggcaaacatgtcatttaaaaactggctgctgacatgttctgtctaagccattctttattttccccaatttgtctttgcctgaaacctgtgataggatgagtcatcttttcagaacatctttttatcaaggtttttaagctaattaatataataatccctcctgcaaaggtactatgataacttcgtagccagagtactggcaacaaggcccttttcttcctcagctgtgtgtgggacccacctccagcttcccagggtctgcactctgctctcaaatctctcggaactgctgttcgggtgatgggcatccaccagccagacctcaccaccacacagtatgtccgtgtaacacaattgcactcataacccctaaatctgtaaacataaataaaatggaaatctcttggaaccaggcatttcagattcactctgggtgactcaggccatcctttgcagagctgacccttggacatattttgtcctcccctccctctatcttttgacccacgtcttgcaagttgagtaagttaaaggtcactcacttcaaacaagcaatttcattttcttcagatttcccaatctccacttggcttcatttcccttaattcccatatcatcttttataattattaagtaacccatgctagcattattgcctttgatgaaagtttctaaaaaattctttcctatttaccccagccttttctcccctttcaaaatgatcccaaatggaactctagtttcttatttccagcccccttcactgagaagtacatacgttaacgtatttagaataatattttctcccaataactcggaagaacttagtaagtttcaatagagccacttagaattgtggcagatgggtataaatgataatctcataaaaggtgaagtgagtttcaaggagacactgcctacattgacaggagttttatattttcttctcctcctttccaatgctattttgcacctagctttttccacaatgtattcacagaatttttatgagcccatctgacatttttattccctttgcactatcttatgtattctgccttcctagccttatcattcttctttggtctttgtgacctggattctggaaatacctgcgtattttcccacaatttgaaagcattgcatttcatacaatactctggactcactagagaggttatgaaagcacttcctagacatttcttttgggtgtgctcattcattcatccattcattcattcttctaatcattatatatatatacacatatatacacacacatctgcaaagtactatgtagtgacttcacagcctttttaaaaaggctttcctccccaaggatacccattttccacacatagtaaatgcttaacaaatatgctcctgattgatttcataactgatttcttcatgggcatttcctcctcttttattttctatgtattctttggacttgcaaactatggccactcttctcccagccacgcctcttgacaggatcaccttctccatctgcctagactgtgggaatgttgggtgggattgctgggtacatatatgctaccttagatgtttcagcagctcagaggcgtcccacacctccttttcatttttctcaaactacaaatcatgttttttcctgtaaaatatcttcccttaatctaggactatgatgaaaccctcaggcccaacttcatctcatctgcccactgtcacggttggctcctctgcggaacccaactcagtgctttgcccggggtcttccaattccatatgaagtgtttcgagtcggccacaggtgctctcaatgtcctactgttttttatgtttctacctacttggctttgcatgcacttttggggggcacttacctaaccaatctttatcatatacactggagcgccctttccttttccagctatgtctccctgcacatctgatctatttttgcttcttatgacacatacatatcaataatcatcgctccccatggaaggtgaggttttctggagtccagttccacacctgaggcccttctcagtgatgcttcccagtactgctcctccccacaatacgggctccttctctgagctcatgtacataatgctcaggttggtttcattgtgatatcatttcaatgactagtgtttccaggaagattgtaagctccttgaatgtgcaaaccatataatgtatttttttgctcagttccccatatcctgaacctgtgttagacacattcaatctattcttttggggggctggaggaccacacacacatatagattataggaggaaaccaaaatatgccaaattcttattacttgtgtcttttcttgcaggggaaaacctcctagcatcagaaaccagccacacagaagtgtttaacaggatttgcttcaggtagtttttccctccccaagacttcatattttaagttttgctgttgttgttcaactttctaaccagtgcccatttcacagtattttctttcattctcaacactgactttcttggcactactattcagtgagtcccttctgcagtgctggcctgtctcccgtgggcctgcatcgagagggctggctgccctccttactgtggccactgtcttctcctgggtctgccagacacctccagagagcgtccacgttgcacctgctttaggtcctgtgaactccagtgtctgcacattactgaattcactttgattctcccttcctgatattcctttcctgtcttacccttccttatgaatattttctgtttctattggcaattttcttttaatttggagcttacttttatttctaaatccattaccaaatgatgaagtttgccacgtataaagaacttgggattctttaaagttagtttttaaaataactaaaatactgcagtggtgttaacttgttcaatgagccaatgggaagccactgacggtccttagtttgctgcgtgtttgctccatctgtgccgaacagcacatccagattttcagacacaacaaaaatgcacacttggtgcctattacccagcaatagtcagccacaagtttcagataaaggtcaaaagtgaaatgcctttaggagttccctcaaaatcttaaaataaaagtcacattccaaacttcataattctcatgaatacatcacaaagtcaccattatgccattgaaaacgaaaacaattctatgcttgtattacaagagaaagtattcaaaaaatgaattatatagaatcttcaagttcttgctcacaaatcatggtttgctttggcttagcagcgccgcatggcatgggctttacgtattacacctctgaagacagaggacaatcccacgcctacatctgcaacaccaaatttggtgtgttggttttataagtggcctcgaaaaatccccttttcaataattctggtaagcctctttcatcttggtgctattctgagaacttgtaatcttgctagtaatacatgaatataaatgtgaaggagaattttctttcttttttcaagacctagagcctttcttatattctttcaacgaacacatgttatgaaatacatccgagatctggctgaaggtttcttactctaatgctctgcctttgtgttcaatatatgcaactatctacttagatcgccgtattatactttgtttgcttcaggagtgatccaattcctttggatcagtaaaatatggcttttctcctcaccccaaccatgtgtcccatttttttagccactcgagcataaaaacaattctgcagctctaaactttttcagaaaacagaacatcctttggccagagaactcaacaacatctttgacaccatcaactggcttgtgtaagccacaaaacgtggccggcactctctcccgttttcttctcttgggataacagctgtaaggagcaacactgttctgtgatgacacgactctgggaagactaacctccccccgccatctcctacagccagaattcttatttcccaaaacaaaacgtgagaagcagaaatactgagaattttttaatgttccaaaaagtactctgtgctccttgaaggacattttctgacattatttcaaaatactttatgaacagtaattaattcttgagaaggaccaaaggagaacccagatgtgccataagccaaaaacagccagatcattcacaaactgcagtgaagggaaagagaagaggaagtggttacctgctgcaatatagagagaaaatgtttaaaaaaaacagtaggaagcttagatttccactatgggggctcacacagaaactcaatttcatcaaaaatctataaattaagtaattaagaagactagtcaagatttgggtagacccttgatcaaagagtaaagtcttacccactttacctccactatctgaaataattagtacctctcagccaatgaattttcacaaaataagggactcttcttctaatggtatggccgtttaccaatctggcaggaacatcaattcccctctcacattttagtaaacttactcaacccatctgtttctctgcccttcagagagtcggcacacagttctgtggatgttttctgcaaaaggccctgacatctacagtttctttcgcattcccctggccaccttccctgctcagatctccatcagtttatgcctgaaacacaacagctcccttcagttttcctggctgcgtgtcctcgcctcaccttagggcctgcttaccattatccacctagtcttacttaagaggattctccccagcaaagacccttggtcacaaatcaccaattactcaccagtttctagtgtataaaacttttacaatttgacctctctccccttgtcagaattccctaccaatgctggagaggtggcatatcaatgtcaatattgtaaacttggattcagacagacctgagtttgaatactagtggagaaaagtccttgaccttttgttttctcatcaataaaatgggagtaagacaacccacctcacactgtcattgcgcagactgtgggggactcatgtagagtactggcacatcaagggaagctggtggtgactcttaggtattatcactttcctactcatgctgtgcattctaagctgttcattgtgtctcctcaatgccatcttcatccctactgtaccttccctggcatggctgcatccacgcaagtcaccctgtcctcacttccaatgcacatcctttagattagcaatggcaagctggtttcaactcaagtgtcaattcctaccagtcaaggatggctgcaggagctctgaattggggagaattttgaggccctgccaaggtcattgagatgaagtgctctcacataactgtgtgtcctaccctgggacatggcttctccaagcacagggtctgtaccctgaagtatatgtccctgaatggcatccctgctgtgcctactgattctcctgacctgttttggggcacctgtgttggcttccagggatcatgaactctttatttaagtattcacaagctttctgtcaaaaaaaatcaatttggaaatataattgtccatgctaagttcactgatatgtgatttctggaattcaattttgttctttcgtggccatcggaacattgccctctccaatcttcctgcatgtctccacatttcaaaatcaaaatgagccagtgatcccagtcgcttccaggtgcccctgaggccctggggcctcacctccaagcataaaggcttcagttagttttaagcaattgcatggtatctttctctctctttgccttgcctgtgattcagttctctccttaccatgttttatttagtgttcccagtttgaaggatgttcagttcttcataggaaagacagagactgaagagtaattacttgattctctctgtcatcaaataatataatatgttcagaaaagacgagtcatcgaatcagagatttcaggaaaagagaggttcaagaaaataaagaataatgtagactagaaaattttatgtcagcagctagtttttaaatcatacatttgctttttgacattgaatagaagtggctaataagccaaatgtgaaatgtgttgatgtcactaatgtagggagatgagaatgtgagccgtgcccaagccatgatgtaaactcactaagaacagcaagaatacaaagggaagggccaaggtgtctgggcgccccataggcacacgcacactctcacgcacacacacgcacatgtgcacctgcacacacctttctgtgtatacagacatctgcatatgcagacacatgcatacactccctcacatacaggcacacatatgaacacaatgcacactcaggcacatgcacacaggcatgtgcatgctctcacactcatgcacacacccacacatgcacatcaaagtttccctcaaagactgcctgccatctgtgagctcatctggggctcaccatgcccaggtcccaccatactaagccaggccttatgctggtggggtgagcttggacagcagcagtgggtggcatttggggggttatttttcatgaccctgaagactttagtcactgtggctgggctggcaaagctgtcacatgtcgacaggatgggagatgaggtggcaaaagctctccctccagcccaaggaacagcgctgtatgacagtggtggccacaggccaggagccttcagcaaagggtctgtccggtgatggccacaggccaggagccttcagcaaagggtccttcagcaaagggtctgtaggtcaggccaccaacgggcagggatcccacagagcgtgcacctggatgctgtggtgcaggtggaaacacacagctctcaatttcacacccagacaggatgtgctcccccaggtagaatcatctaaaaagaggctgctaaatttcacccctctcctcctggaagttttcttagtgtctctctaacttaaacatctgtcacaagcagagctaagctgggaggaaagcccaaattctggaatctgggaacccacaagccacaagcatctctctaacatctgactaatgtgacccccacagcttttaaattataggtgttgattttgggggctggaggcataatcccgaaatcagtaagcatgatttggaagctgcagaggtcttttggttttaacgtcttgagaagtcaacatgatatcctaatattagccttcagtcccttaagaaatagaaaaatctaatgcacacgcttcaagaatgtagaagtagaaagccatcatttttcaccgatttttgtgcaaaacacatggagaagtagcacatgattaatgaatactaacttcctaacacagatagagcaagcaaaatatattccccatagctgtcttctttttgtaaaaggcctttttaatgagcagaaacatggctccatcctcatgatatgaaaaagagaggctcgaatgggcttagtattcacctaatcagaacagtaaggcaaatgctgatggagattaccatctcctgaacatctgaaaagaagatgcaacccttgactgtagctaatactttctgcctatttcatctccaagagaaatgaacagtgacaagtgccagacaatgtgctgtggccaggaagataagcctagagatgacaccgtccctgcccttgggaaagctgatggtgtggtctaaaggctatgtcagaataattccattacaaggcaatggccctttctgtagcgaggcacatgccctcagcagcacaggggatggccgtcagtctgggctgaggctttcagggaaagaacactctgagcagtgtttggatcttttcatgtttaaaatgtaaccaatagatcaattttctaacatgagttattttcaaaatgaaagactagggcactagccagaagtatttttattaaaatgttgaagccaggaagcatcgattttccattggaaatgcacattccaaaaacgtgaatctacaatggtgaagaaataggatgggctcttacgtgtgctgcggaatcccacgcatatttcctcaccctgtgggcctcactcactgggactgtctccgtgaatccgtgaatacagagttttggctctgcctttgtaccttacacatttaggaacagcagcccttagtaagcgtctgtcttctgcagtggaaatactaccactcataataaatcagcacttgagctaagctactgtgattgttagttttatgtgtcaccttgcctgggccatgggatgcccagatatctggtgaaacggtatttctgggtgggtctgtgaggtgtttctgcatgagatgaacatttgaactggtgcactgagtaaagcagaaccatcctccccagagtaggctggtctcactcaagccattgagagcctgaacaaaaccaaaaagcagaaggaggttgtattagcgctccctgacattttccttctcctgcccctggtgctcccagttctcaggacttcaggccataccatcgctttcccagttccacagcttgtagacagcacactgtgggacctctcagcccccatggtcatgtgtgagtcaagaccttataataaatccttatatctctataaactatctggatgtattggtaccttttctctgggaaaactgactcagagctactactcgatgaccacatcccctgtccaaagccttggttagaccctctggaaatgggaccccgtttaatttttgccccagattctcatagtgcagagggcaaaggtgcaacatcggctccctgatatgagtgagctatgagtctggagaggcctggaaggagggaaaggactggatacgggaatgccctaaggagaaactgccatggaggggcaatactgacaagaccaagaacgaccaaggacagcattggctcaaaggctgcagctgcagattcagggtacactgaagccagtgggactcagccacttgacactggaggggaaatgggggcttgggatcacacccaggccaataaccatctggtttattcacatgagggtgctgaacactcgaagctcctgagggtggctgcaggcagagtaggagggctgagcaggctaaagggagagatggccatgcctggaggggcccgctgtccggtcaggcccagacaggagcctcagggtccagagccttgtgtggcattcagattgtgtgggggagagaggcagaagtatcatgccaagaaatccattcctggaagaggaggaacagttcccaggaaaatggggctgaggcagtaagaccaccagctgggatacagaggagccgcctatagggacagagaaatcctaggcaccccggagtgccagaaaggcggtgggttacttcgtggggcactgagattggctgaagctgtattcccagatcccaaaggtgaacaaaccatgagccccggctctgcagccctgctggcctcgcagagaggcagcttgcattacatggatgcctggactcaggcaagaccagcagaagatcccaaatgctcacttttcccaagtccacacgataaacagtgtgtgcttctgactgtgtcccaagctacttgacacctccactaaacccaaagagttaaacagaattcgtttctgggaagaattccactttgcattctgctacattagttcaaagctcttcttcgaaacaagtttggaaacgacacaaaactccagaaaattcaggagtggcatttggaaaacctgaggctgagggtggagaatggcccacagagatgctgtttgtcttgtctttcttcacacagaggccacccacctaggaagaggcaggagaggccccgggcaccccaggtgtagacatgagggctgcaaggccaagccacagggcactggacatgcagagacgcacttttccccactatgtgtcagagggaaggaacgccctcatttgctcttattcagccattcaacaatagtaacagaattcctttaggccgcatgacatctcaggggcaagccagacagcctgccgtccccaccctaaagcccgaggccagccactcagatatctagtctaaatggctgcacacagctgcaaatctaaatactcccctacttcgtgcccacaaaggatccagtcctattaatatcttatctttgtgaagttcccggttcctctctaaacaagaagcaccaccacagccaagactcggtttttccattggaacatggaatgaaatgaagtgagtttacatttggggctctcattgtatcggatgaactcttctctaaaggtcagaaggccgggcatcatgagctgtcacttgagcagaatgctcaccctgctgtgagacccagaaagaagccggcacgtccttgagcgccgtacagtgggatggccttgcctgggcggctgtctggggctcaaggacatgaagttgaaaatcacacacacttccaatctatatacaaggaggaagcacatgagagcccaacactggtgtttccaagagaaacgtttcctttcaggggctaatgcaggcgctacaatacctgcagcacaggaagcacaaactattttcagactcagaagagagccgttcaagtggtggcaatgccaccaatagggagtatctcatcaattgtctttggtgaggaaacgctgacaacagaccaagaaattggtgaattcaagaagcctgagtggtctgggcgcggtggctcacgcctgtaatctcagcactttgggaggctgaggcaggtggatcacgaggtcaggagtttgaaaccagcctgaccaacatggtgaaaccccaactctactaaaaatacaaaaaaaaaaaaaattacccaggagtggtggcagacacctgtaatcccagttactcgggaggctaaggcaggagaataacttgaacacgggaggcagaggttgcagtgagccgagatcgtgccattgcactccagcctgaaacaagagcgaaactccctctcaaaaaaaaaaaaaataataataataataataataattaagcctgagcgcagccttgaatcgctgctactatgagccttgaaactcagctttgatcttgctggtaaaatagcaaaatgtgaaaagagagactcctattgccactatagaaaaatccatggctcaggagatcagcataattttgtctcttgcaaccaaaatgtctattttaaggattatctaaccacagggtagagcaactgacagaattgttcccacttcactatatctatttttatttagtatatgtattttctttgcacagacaaaaatcaaaaatcacaaaaatgtatgtcatttgaaatgaaataatgaacactgattaaccctgacaatttgagcataacagactgattttccattcttatccctcccatgtccttgtgtaaaaccctggacaggttgttgaaatgcctcaagcctcgggagctacctgtaaatgatgggtgtcaggccaggcgcggtggctcacgcctgtaatcccagcactttgggaggctgaggtgggcagatcacgaggtcaggagttccagaccagcctggccaacatggtgaaaccctatctctactaaaaatacaaaaattagctgggtgtggtggcgcacgcctgtaatcccagctactcaggaggtggaggcaggagaattgcttgaactgggacccaggaggcggaggttgcagtgagccaagatcgtgccactgcactccagcctgggctacagaacaagaccccatctcaaaaaaaaaagatgcgtgtcacaggcctagcccttcagtggagaggagaggacagagtggactaaggtcagtgagtatctggggagagcaatggcttccattccagatctcctcattttggcgagtgctggattcctaagttctcctggatggaagaggggattttgatctcaaagaacagggtctgaatggccccgcacctaagcctggaggtagagggctggagtgatgagttccagctctagcacgatccaggccggggtgccatccactgccgcgaccaagaggagacccttcccaaggcaaaagaacagcttccctcttctccagcatctctggctcctcatcaccttgcaatcaactcgttcctgtgaggggacaaggccctgcgcacccaccctgaccccctgcccatcccccactgctccaggcagccctgttactattcctgtctaccttctcaggaagctctttgcaggccttgagttcaccgatttcttggtcagttgtcagtgtttcctcacccaagacaacggatgagatactccaagtcggtgcccttgcaggttcgtccttcacagaatatgtaaagagttcaacatgttagacgttacactgcaaattacgctatctgtattttgggttaaagtccaaaagcgcatagagaatacccacagccaccttcagggctaaataccaacatctcaggttcctgatgcatggaaaactcaagaagaaatggaacatgagatgctccggatcccaggctgctcctcaaggtggctggcacggaccaccgcttcttcctctgtcttccaacagaaacatgttctgcccccagtggacagatcccagagacggaatgagggtcagcgcttcacccacatcctcatggaggacaagcaggtgggttttaaggcccctgggaagtaaaaatagagggtctgcttctgaaaaggggcgtgaagggaagggttggctgaaaggatgctgccggggggcacagcaccctcgcaggggcgtcactccttccaaaggtgactcggtgctattctaaacagaagagtcctgtttcatgttcggtaattttgacatgctgctgtgtaggttttgtcatcttttcctcttaattaaagcctagttgaaggccttttaaagttcattttcctggttagacaacaagtgcgaacacactaagctacacagacacacgtgagcgcgttgcaagctaacaagcgctcggcaggcggcttctgggattttgatttccagactccccagagggaacacaatctgtgcagcattcgttttatcattaacatgtccttgcactgtttaaattttatgtccaagtcataatttcttttatgatttaccctcttaatcagtacatctaatgaccaccatgcttacactacactcaagattcccttaaaaggttacaaacccatagcattccttccacaggctcctccggcttcctcgatccttccttccctttggactctagcttcactcgcaaactactcatcaaccaccccaggtgaccaaaatctctgggcactcaccctggagtcacctccagctcatcatccctgtccacacctccaccagacccactctccaccccacttttattttagtttttattttgttttacattttaaagcttagcaagtgaagcttgggtgcacgagagcaagtggggactggaaaaggaacaaagaaatctataactggttgtgatcaatgatctgtcaatatcactgcatttggaccagcccactttttaaaacgtgggtgtcacttttgggtctatcctgccggtgacgctgggcactctgctactctctttgccttcagtggccagtgaaactcggcaggggggtcgccgtgcagtggcagaagccaagggcgattgcacgtcccccaggggtgggcctctttgcacttggaccagcacagaggtgctcacagggcgggtggggggctgtcctgacctgaatcacgtgcacagacgtgagtgtcctgcccgcccctctcctcaggacacttgcagctcccacctcacctgtccgagaacactggggcttcccctcctgaccttaaggtgtgtcgaggacctggtgtctagaaaaagtacaccgatgccaagtagcctggcatcacattagccacccacttgtctctttgatcatcttcacgttttgcactaaattcatctaaactcttgatcttgtcttttcatttcttcagcatttctcagcaaccaagaatctgccatatttttctgcaactaggaggcaatggcgagggagctttaaccatgccatctcctcacagctggctgtccacagaactcatcttccatgtcgggatgtgctaggggtgcacgggagcgccattagtaatttcacccaggtcacagcatggacctcgctggcctgggcaaatcagaccacaagtcagccctctcccatcgccttctcagccctgcgaggctggccacgtggcagggactagacttgtcagtttccttatcacccaccccatgtcaagtgctgaaaatgcaatggccttcactaattgtgcagagccctgactgcccccaagtacatcgcaccttttcataaaagtgttcacagaaacacctctcctgtgaccagacccggcttctttagtgggttatttacttcttgtctccctcttcaagagctctgagctgggttcctagagggatcataatcgccagttccaccatctgcagatgaaccaatctagattcaccttcaaatttccattttctagcatgaccttgacaaccaattagtcaatcaagagacacacttactgagcatagattctacatggcgatgctcagatactgtgccatccctggaggggcatggagaaagaaaccaaaatgcagctgagaagatggggtctgcacacatgtctttcgagagattcatgccaaacatttgatacaaacaataagattaacattcgccaaaactgtctttccgaccgattttcccaccaccctcagaagtgcctgcatcctgcctgccgctgagagccaaagctttggaagcattgtcaaatttagctctattcttatctactgccaaattcagggtcttcttccctggaaaatctttttgacagttcttactataaaaatctgctaccaaggccctctagaccagcagtctgtggcatacatctctgagaatgtgataaaagttccaggcattgtcttcttaaaaatgcacttgtgcacagattcataaaaatttgcatatcatctcaaggggttcacgggccccccaaaagaggccatgctgtggtctagactggactatagtttcttgactctcaacttttcatatatttccaatctggaggtggttatttttgttagtccattctcacactgctataactgctataaagatactccttgagactgggtaatttataaagtaaggagatttaattaactgacagttctacatagctggaagacctcaggaaacttacaatcatggtggaaggcaaaggggaggcaaggcatgtcttacatggtagcaggagagagagcgaaggagaaagcacaatttttaaaaccatcaaatctcatgagaactcactcactatcatgagaacagcatgggggaaactgcccccataatctaatcatctcccaccaggtccctccctcaacatgtagggagggacaggaactcaaaggatgatgactggcaggtaggcagatgggatcaatgggtcatcaagtcaattatctctatgtaaagggtcaggagaaacaggatatgtccagggttctcactagcatacaaaggcaactgccaggtaatctgtgtcacttaacagccaaagatatcacgcctcaaattcataagtagattctagaattgtgggaaaataaattggctgttatttttaaaaaatctcaattcccacctacacaacttacccagagcaccccctaaaagtgcagtcactctctttcaactagtgataaatgctggattccattcaaggtcaccgtgcaggaacacttagtctactccccagtgccaccgttgggggctggaggtttagccctcccatgcaaattagcaaagtcccaaagcttaggcaaacatgaccaaaggtgtgtaggactgtggcacctagagaagtgtttctggacgtctgcaggctgccaaagctgggggctcgcacctgtggcattgctctgacccagggaagagtcagtaaaatgttgtagaggtagcggctgctgcgtctacctagaaggctatgaatgataagaaactcaacctaattacttcgctttgccaactatagctttcaagttaatgctacagtttctcaaatggcacaagtgcacatcatatagaactagaaaaagttgtattaaaaatttgacattatcttctagaagttactgccaatcatctgacttgagatggcaattgactctgctcagagatggcagataggctcagatacagcaacccaaactcaggcctgcactttcgaacatgctgtttgaacatactggaaacaccagctgatcttcctcactctgacactttaagaagacaattgccaattaaggaatcaaattaaggaccatttctagaattattttccaccaaaaaggctctgtaacctagcacacttcatcagagcttttcacattataccctttcccttattaacagcgtgtcactgttgcaggataatgtgggacatgcactgccaattgtccaggacaattcgccaacatattttgccaagaactttgacctgcgtttccttgtttaagcctctgagtgttctcacagcaatagttttcatgtttctgattcatttatccctaactcacaaattaggtttcttttgcccaggaaacctggtaagccttggtccttggaaccagattttaattttgactctcagaaaaggctcaagtgctcattgtgaccagaactcctccaggtttgagtaggcgctgagctggaggagacgagcccccaatttcttggtgctgccatacattgtgacagtctgtccctgagggttgccattgtgcagagatggtagcacgaccactcgggtcctgtggaactagaggtctgaggtgtgtccctgatgattacaagagcatctcttttctctgcctgcctccagccccttcacacagggtccggctgacatggccaaagagcaacacaattttaagacaaaggacaatattcttgcatcattacagttgtgacacacaacatcctcatcaaagtgccaagaaatcttgcacactggagaaacacatttgctgtccacagcctccctcccattcctccatctggtatttccacatctgatggtttcatccactctaaacccaagtggtatttcccatggctagctgtacttaattcccagggaagagagaagagctctgcaaacccatttcctactggagagatatttcaaaatttccaaaaattggaacaactcaatgtctgttagtctcatgaatgtacttctgagacacaaagtagacacaatttcctataaaggactccagtctcttccttacaactattttaacaaagttgaatttgggaggttgaaccatccctaaaatagcagagagggatatccttttaaataatttctagttcagcatgataaaaggcagaaattgtttgcttctctgtattcatcccataaataaatgctgagggcagcaattcttttctgtttgtctccaagtctagaatagtgcctggcacatagtgggtgtacaataaatatttcttacatgaatgaatgaatatcattcattttataggaaatgcacacatggtctacttatgtagtgtatatgtgtacatatgtttatatgtatttaaaatctaattttgtgaagttagattacagttctgttcattgagcacacttaatatacaaaagccataatgtcctagaaataatcattttaatgtaaaaatgtacaaatcagactcatttccttaagacatgtacagagctcagaagactttatgaagttgtatgtgaagatcccacttttagactctttaatggataaacatcctcaatctgccagcatgttcagatttttctcttaggctctcacactacatggttttctttctttcttttttttttttttttttgagacggagtttgtacagagacacaataaaggaatgggctgattttaagtccaaatcttaaataactcctttttgaattcaattaaagcttttgaatgtcccattaaacaacagccaacgacaaaatattcttgtagttcacttccttttttttttttttttttttttgacaaagtgttgctcttgttgcccaggctgaagtgcaatggcactatctcagctcattgcaacctccacctcccccattcaagcgattctcctgcctcagcctcccaagtagctgggattacaggcgcccgccaccacgcctagccaatttttgtatttttagtagagacaaggtttcaccacattggtcaggctggtctcgaactcctgacctcaggtgatccacccgcctcgtcctcttaaagtgctgggattacaggcatgagccaccgcacccagcctcacggtaaatggctttctgacctcaacctatgctgaattctaaaatatttacatgcaaatatttacatggctggaagccccacctctggagccccagagacattttctaccatggaaaatgtcaggctgaggcagccagagatgcaacccctccaaagtcagctccagctctccggggagacaggtgcgctttctagcggggagtgagctgctgtgggcagctgtctccactgtgctcaagccaaaactcagatgtgcagtgctggctaacttcagccctgcgcctctcccacttgattaagagaccagagaaagttctcaaaagtgattcccattttgcactctgccctattaaactaggaccttcccataaatcgcttacaggaagaaatctatgacagtctcctctctgagtggctatgatggatctcatgagaagtgaagctacggagattctgccaccacctacgcgaaaccacggcaacgtgccttgtttcaatttgcttttgttcatctcataattgttatacctcaaagccaagggctccatcttggaatacattagggatagaattgtgccctcaagaattatgcactcaagatgtattcgattgtttgaatatcattataatcccaatattttgtaaattatccaagaagctgatctcttataagaaataaagtcgtagtaaaagaaagatacttcatagttttaagtacatacgaatatcgatagtataatcacgaaatcaatagtaaaagctaacattttatgaatgctcatctgaagatacaaagaggcacaacagtttttcctctgctctcacaacaagcttctgacaccggctgtgtgggaggtttccccacataccaagcaagcaatcatttcttcaggggagaccagctaggcttcctttaattccactcaattctgattccatctatctgaagacagcatcagctcccacagatgaaggctcagtcccacaagattgccccacttcagaccccattgccaggaataaattgtcacctattcttctgtccattggttataaattggaatttccatgaacccctcctggggtttgattaacctgctaggaaggctcacagaactcagggaaacccttatgtttactgatttattataaaggctactgtattacaaaggatacagatgaatacccagaacatggaagagaggcacagagcaaggtgtaggggaaggggcagggcttccagccctaccagggcatgccaccttctaggaacagctccacatcttcagccatcctgaagctcctcaagcccgtctttttgggatttcatggaagcctccttatataagggcatgattgattaaatcattggctattggtaattaactcaacctcctacacggcccctctccccagaggttgtgagtggggctgaatccatcctttagcctgccttggtctttcccagggaccagcctaactctgaagctgcggggtgggggggccagccaccagtcaactcattaacatacaaagacacttatcacttcggattccaagaatttcaggaattgtatgccaggaaacaagaggaagaccaaagatctacttcacagcatgaaatcttatgatatggcagtcactcatttaccagtatcgtgtctgcgaccttcacaacacaataaaggaatacgttattatccctcatggatagatggggaaactgaggcacaaagaagttaagaaggttgcccaaagtcaaacagctagttgctgtttgggcaaataaatttatttttattaattttattattaaaatccatcactaaaactgtcatcaggaattcaaatccatctcatctgactccagagtctgaaactgatgccttttgcagtctcagaacttaaatgaaaagatttggagccagaagagaacagtgcaagtgctaaattttcaacgtaacatctatcataccattaccaaaattattctcactttaactcaggcacatgtccgaatgcaaagtataagaacaattccaaccacctgcatatttcctaattcagagtaagcgctgaacacacacttactgaacaaattttaaaggccaaaagcaagatactgagctatcaaactattacttcctactttgttttcatgtgaattcttactcttgttttactttcgctgatgtaaaaaaaaaaaagagagagagaaatgggcctttggttacaaattggcttctcgcctaggacaatacccaaagttatttatgttttaaataaatgatctagtcaagagaaaaaaaaatccatatatcataatatattaattgatgataacctccatggaaaaaagagaaaatatctatgatcaacatgaaataataaagaagtatgaattatagaattttttaaaaaaagttttaaaagcctaaattcctgaagaaatacaatcttattattttcaagtatttgggaaaacaaaatctaattattatggaggcgcccaatggctatttagtcagactagacaggctttaacaattgataaaaagcatctggcgctagcataatgtttacatgaaaaacatgtttgttaaagataagctaggaatgagaaatctttcaagaagatcgcccactacatatcctacgtaataaaaaccgtgtcatccccttttccagttaatattattgattctggaccgggtttgtgtatgtgtccgaaataaatcggatgctgaggctgaactaaccattccgtggatggtattttcccccatcactgacccattttcctgctttggtaagtttatcttcattgtataggccatttccggaccaaaatttaggagttattttaaaccactaaccttcaaccgtcttttatctctagaaaccggatttggcggtcgttaagaattcctcaccaggaagccgagtggccgggcctggaggaggtgggagggaggcagaggacccatgttcagagtcctgcgtcccagcgcccgctgactggctctgccctgggtcggcctctgagctagggcgctgagcgcatcctgcccaagtgtgcaagctcgcaggctcgccgcagaggatggcaaaactcagactgaaagcagatcagttctgagacacccacgccaggctcccgaagaggggagaaagccacggagggcagagtctgctccaggcaccgctgtgctcatttaccatcagcccagccctctccagatccactcaggagcctccacttcctgacacgccacatgcatgtttctggaaccttcctcccccgcccatctgaccttccaaactgcaccacacagctggaaccgggattgcgggcaggagcagaaatcaacggaaaaagaagacaaagagaacggggagggccatgttacacgcaggggttcagcctcaaagtgagtgcaaactaacgtcccgacactgcaggcctgcacctaaggctgctcaagcggcggcctcagtgaaagaagtcgggctgtcagtagccgcaccctcacctgctagaaatgcagattctcggcataccccacacctccaaaaacagaagctctggagctgtttcgtggagccctccagctgatgctgctgtgagctcatgttggacaacggctgaaggagatccttgtgtgggcccttccagccccaaggggtcttgatgtcattactttgctgtttatgcttctgaatttgtctttaatttaacagagtagtgcctggcacaaagcaagctcggtataaatgcttcacagacattaactcacttaatccttacatttgctccctaaggaaagcaactgccctcatccccatcatacacatgaggaagaccagggcccacacatttccctgcagggcctgtgactggtgcacaaccagtgtgtccctggactgtctcctctctggatgtagttgagacgttgccatcgcctttccaaaaagtcgtgtgcacgtctgacccgttaatgccagcttctttgagaaacagacttttcttttgccagactaatcgtagggtccttagtctggtggtagcaaatacgtcacacacaactcagtattaattctgtaacattaaaatggcattgcattctttaaaaaactctaaaatgcaactcaaaaattcaagctaatgataaaaaagagttgcttatattttaaaatgacatttcaaagctggtgctcttggatgatatgaaaataaatgccactgtgctcagaaatcaggcattacttgcacacaagggaactgcggatctgaaaataaattttgattgttttatattacatagtaatatacatataaataaagcattattagagatgtaatagccaaatcttccaccaattagattagatattaatattgtttatttaataaatatgaaggaaacaataccaaaatggttatcattgagtttatctgtacaacgctgaaacagagaacaaatactgacctagtaccttcaaaaatgccccatgtgctgaatgtgaggattaggcaaggtttatctttgtgcaatgaagacacatagtattctcctctgaacgtgcatcatctgtcattttcttctgaatgtggatcatctctagggatgagtgtggctgctgggaaaagtttgtggaaatagctttcaaaacattgaattacagctggaacacactgggttttgttcttcacaaaggaatatccttgttttctaaagcagaaacttaataaaatctttaaacaattttaattgtgtccaatacaggaatagtgtgcctccagatcttctgctgaattgagcaatgtttatttaagttagctgcactctctatgagtgaatacacaaatggcttccccaattgttggtgtatttggtgaaatgaaaatagagcaactgacatcaaactggatgcttccagctcacggccagtatctctggctgtggtccttgctggaatcagtggccacagtacactaagatgtgtatgtgtatgtattactaaacaatggtaattttacaactgaacaatgtactgattctaaaagcaacagaagatgaggaggttgaatagctctcctttatcaggtaagaggtacaacaacagaaacacaaaagcccaagtggcctggaaaagattgctttaatatctgatttggacacttggcatttgtcttgtaccttaaagatcaagtgagctttaaaactcagataaaatgaaatgtttttatagtatgcagattaaaaaccaaatccagcaaagcttccacagagaaaattactaaaccacggaataaactatttacataaagtgttcagcagtgtacatatttccaagtcatgtttagtctgtggtggaatatctactccaaattccaaattaaggggaaacaccttcgtttgcccagattcatctttgtgttcactagtaataccacaggggtggacagtgtaagccagcaggcagctccctctaggacactccgggggtggggagggggctcccaagagaatggcagctagaaaattggaaccaattacaagtaattaattcctgatttcctcctctgtgtcgggcactctcccaaacatggtgggatgctttaaaaagaagttatgtcctggcaagtgttggaaccaagacacaaatgacaatgtaactccaagccatgtggcagcaaccacaaccagcaccgctcgagtgcttacttcatgtgcacatgctctccctagacatggcgactaccctcactgtatgtattagagactccaagctcaaagagattacaatgctactgaatggcagagcaagaattgcaatttaggctggattttttaaaatccagatagtcaacaatatttcacattaccactctgactcgagaggggatcacgtggaaaaggggcaggctgcgaactgtttcaggagcttcagtggaatgcgtgctagccgagggaagacgagaggacactgcaggccggggagcaggagaagatgaaacagcttctgtggaatgcagagattatccttccttacagttaccaaagccgtatgtcgaggagtagcaaggaacgaggccagaaaaatttgacagatccgtaccacaaagggaatgcacagccaagccaaaaagagggggaaccccagtgagatagtaggtggccatggcagatcctgaaccagcaagtctatgaccataacttagggaattgagggcaattagcctctcacagcctgaggaatgggctggagagcacgagagctgggaggaggggcagggccatgagggttcagtggtgatcctggcacaaggcaaagagagctggaagggagtcccagccgtgggaagggaaagctgcgggcacctctgggaagcatccagaaagaagtaggagactttgtgactgagcagatgcagaggataaagaagaggaaaggctaaagcctcatagtctctgggctctgtacccagaaacatcagagggcaccaggaccaaaatggcagagtcgggaagggttgtcagtccaggtaaaaaatgagttcagtcctgaacatatttgctcagtttgagatcaaagcaagacagccaaggggaggcgtcgcgtggaaatgtgaagacgttgaactggagttcaagaaggagttctggagtccccttcagggagtaatggtgcatcatggagcagacccccagtggaagttagagagtgcaaagaacaaagagaaccacgcagagctgcccctgcagctcacccacactgaggggcatgggaagaggaagaagacagaagcagagacacggaaagagcgctaggagggacccatgtcccagagttaggaccaggagaacaatggagggaaacgaggctggaaccagctcactgtgtaccagactatcaaagtcttcaccccaaagtcattcctacagtgtcaaaagactcagaagaaattcaccattaaaacatgctctggttgacatcccttttcattgtatgcataagaatggtaggaatatgtcttttgtattgttctatagttgacattttttcatggttgcttaataatagcaggaagaacaatgctctaacattattttaggcattctattgttgcttgagctgactctagcccaagaactcaaaataccaaacctccttgtgagacattttaatgaggttaatccttcttcaatttggggaacaattattataacaaatatcatagaattcatcaaaaccactgttgtcatttagccacttcttgatgttcttccactgtctacaaaggtttgtcttagatcatcactggtgggttccatttgtctgcaaaatctttaccagctcttaactaaataactgaacttgttatgaccatccttgccagttctcagaaatttgccaacagccttgttaatgaataatgtagggttttgtgaattccctcatggcctggcccaagtaagggtaggttttctgggtcagttcctaaaggcactcctgactagaatcagtcatccatgccgcaactttccaaacatcccctgcctgcctacctgccacctccgagaaaagggacaggaccacatactggggcctcagttggagctgggagctcttttttaacactggtctcctaaaccctgcccttccaattctttccacccctctgagagcaaagttcagccaccaagattgttaatcacagaaacaatgacattttggtatctcaaaggagcaaacttgaaggtcatctttcagtgcaaagacccttagacttgagagcagacaggcagaatgaccatgtcttctgtgtatagtacaccatcacagtgcacatggaaatgacatgctggtgtatagttcctatttctccctcatatttcagaggcggaagcccctcccagaagtttcctctgagttccccaaagctggattcagtgttcctatagcccttcgattcccctgattgtgacatttaccagcctgacttggattcgtctgtttcttttccaatatttctcacctgaccttcctgaggacagagagtgggggtgagtccctgccgcatggccagcacctggcaaggtcatggcaggaaggaggtgttcccgatgtgtgtgtggaatgaaggaaggcacaaacgggtccgtgtgaggaagggacagacctgccagggaaactgaggtatagagtttgatgagtacccccaaatcatctgcttaaaagcaggtataaaatgtaaggtcctctggtgcctaaagcacactcatcctgtgtacacgtgactattaataatatatagcattgataattctgtgaatctagtcagagtacatgaacattgtgtcttctggttggtcttaaagttatgtcccttcaccctagtccaattccatctattaatataaagagcttgcagatataaggaatagcttcaccaatatcactcctgagatcctgggcgatgctgctcttgttgggactgattcagaaaccagccttctcttctaaactacatttccagtagaacatggtccatacttatatgggaatgaaatctcacttagtttgaactctaggtcattcagtcccagaggtggtgactaatggtcaggagatgacagtattgctggacaagcatcaccacactgaggggaaagttcacgtttctaatcctgagaaataatctgttaagaagcatcacacagaaccagctagaggggagtgtgaaagctgctgcaggaagggttcattccgcccagtgcaactgagtgactaagagtagagggtgctcacaatcagaacactgctggcacgtgtttgtctggagcctgcaagctattcctcctttcttgctgaagaaaagtggaggaagggaggagcggggagtagagtggtaggttcagcgtgggataaaatcaatggtttagaaaatccacccatgagtacgtaaacaatatgaccatagcagatacagcaaatacaaaattaaacagcctttcatgaagaaaaaacaataagggcaattcatgcctggcacacagcaggtgatgtctggatgtacaaatgcaggtgaagtgtgattcagacagtgcaaaggagaggtaagccaacagtcacttccactggcttctgaatgaggatctgatcaaatccacagcatcttatcattcaaaatgtgcttttaaattatgttttgcttggatcagtattgaagctatttcagtgttatggtacatctaacagctgattttggaaggaggtaagccaaaatgttattgatggcatgaaaagtgagacaaattttaaaattaggcagattcagtttttaagtgattttcttgtatacccatacatcatctgcacattaagcacttttctctaattaagccagggaaaatacagagtaatgataatatctgtgaggtcagctgtgatcagaagtgcccacaggctgcatctcttaaaaacagtccatggcacctcaagggacactgcaaagacagtggccgggaatgtaattgagctttaggaaatgattaaagggaagtaaaatcatctccaactcaacattaatgcgtttgatttcccgggtgagaacaggatttgcgtaactgagtggttctttctttctacagtcctggatgtttggaaagccagctcttacagttagctttctttgctttgctaacattatccatcagaaaatcgaaatgcaaacagctcctatttcccaatgaagaactttctctgatttaccttaccatcatcaggcttcaccatctcaccttggaagcgttcaatcttttggtcaatatttctagaccaaaataaagtgctctcaagcctgttctttggaaagtattttgtcatcattaccaaagagtgtttaaataactggctatgaagtttggggagactgggctgggaggtacaatctgaagttaattgctgatgtaatcattagtcctttcaatacccagtggagaagctgcctccagggagataagctctcaattaggagacgtgtgtgtatatcaccagttctctctggcatgtaacagttaacaatttctatacagttaagtggatttagtgagtatcattcttccaggagagaagtaaaatttttttttaaagaggaaaacaaagaacaagattaagaacagtaaaagaataagtatggaaaatctggtaagtagcaaaaatcatttttaagcatttgagggagaaactgcaaaatctgttcagaagccacaccttccggcctgtgggactgcatggctgtgacactgagcaacagctgaagtctttattctctcggaggggaaggaaaaaaggaaacaacagtcagtccaggcttgtccacggctggaagcctcgactcctgcaaacctcctgcaaaccgatctcccagatcctttctgggcaagcacataaccaaaggaaatgaaaactagaaaaacaatttgtgcatggaacaatgacatggagtttcactttggtttcatgctcaaatatgaatgtggttataattttttaaaatatatattaatagaaggcaacgagttgaggatggtggcttcttcaagccgggcgtccagaagagccccacttctgccttggagcgcgccttaggcagcagtcgtgggaaagctcagatacagctgtttccaggcaaagggcccagagcttttcagcctcagccaccagggtctccagacaaggagaaatacgcccaaagctgctcccaggggctaggagctcggagctcccagtgtgggtctctgagcagcgcggggtgggcgctcccggccctccagcccccaactccctcgcgcacccgggacgggtgaaggcgcccagctgccgagcatacccgcgacgcgggttcaaatcccgccggctcccaggcaccctcaccccgccacagcgcgggctgtttctcctcccttccccggaggaattccttaactctccagtacccataccataacaaaggaggctcggtccaccaatgcgcgatcgtagcctacagggacccccaacgaaccccggcccagagaatgcacctggccgtgccacgcgcgacccccgaggggcaggcggacgggtccaggcgcggacaaaggggcctctcggggcgcccaagctcggggcgggacgccgggagcggagctggccgggaactcaccttcgcagcggcccggctgtgctcctcgtggagcagaagggcggcgggcagcagcagcagccagacgctgagccggggccccatggtggcgcgcccgaggcggcgagggacggctgcccggcgtgcgggggccgcggcggacagctagctctcggaaggccggacttccagcgctacgcaccgtcccgggtgcggcggctccaagcggagacctgagcgcggcgggccgagctccccaatttgttggcgctgccccctcccccccggcggtgcgcgggcggcgcctcaaaggggaggaccctgcggcgcgggtaagaggcggcgggagcgcgcggcccgggagtgtggctgcagtgcgccgggacaccagggctccgcgctccgcactcaagaggctcccgcgtcccaacccctcgcgcccgcgcgttcgcggatccaggccgaggaccgaaaggggccgcccgagcccccggggccggcgcccagagagcccagcaaggccggccgccctgccggtgtgccgccggcgggtgcttctggaagggccaatgcgttcgggcagcagcccctgaagccgagcccgaggtgagagcgacccccgagcggcgcccagaccctggcccgagagcaccgacttggagcgccttgtgcaggctagggctgcacgctctcctgcttgggagtagaaagggggagggtgggagagcgaagaccgagctcctcggccaaggagcacccacaggggcctaacgggaggctctccttctttccgggtcgtgggggggacggccctccggtcacccctgcatgcgggccgcgcaccgcgctgtccccgcgtctcgcggaccgagaccggcggtgaggatgggctgcctccctcatcctgcgctaaactcgctttgtctgtcgcctctaggctaagtgggactgaccggggcccagagtggacgaaccgccagcatggggagagaccagcgcgcggtggccggccctgccctacggcggtaagcgactttctgcctggtccccgtgggtcacgcgcgcatggacccttcggtgtaactctcggggactgacaagccgggcccgcacgttcacgtctctcttcctccctttcccatgcaggtggctgctgctggggacagtgaccgtggggttcctcgcccagagcgtcttggcggtaagtcctggctcccgcgcttggacttgcgcgcccgagagtggttgggacgtttgagtggccttggagaaggcagctcgtccgtgcgctcccgagtgtgtgtgtgcgtgtggatgttcgccaggctgcccaccaaggttctgagaaagcttgctcttccctcatcatgctttccacctttccttccccttgggttcccagcgtcaatcctgtgttttgcaagcgtcggcctttcacgggaactgggaacttaaaatgtagcctgaggcaccgttttcgttgctttgggcaaagctgcagccgtagaggccaggaaagtgtgtcagtcactaggcagtgagacgccaggcttagggcgaaaaaagttttcctggaactcgggagctggtggggagtctctgtcacggactgagggttttttgtgtttttaaatgggagtctctgggtaaaggggcggggcgaggaggcgaacgagacaaccttagtattgtttgaattgaagcattgcgagggaacaatggcagaa

SEQ ID NO: 118 - DNA, 52812 bp, Homo sapiens
  source 1..52812: mol_type = genomic DNA
ggattacaggtgtgagccaccacgcctggcctacttggttttttaaatgtttgccttgtatcctgtcacctgtcacactgatttaatagtttccaggagctcttttgtagactctgggattttctaagtagacaaccatgtcatctgcaacaagggacagagttattttatttttcgaatctacatgctgtttatttccttttcgggccctgctggtgtgcctagaactttagcactgcattgagtaagaggtaagagtggacacccttgccttgtcttgatctcaggaaggaaacattccatttttgcccatgaagtatgatgttagctgtggctttgcctttgacagatgctctttatcaagttgaggaaggtcccctgcacctatttttctgagagtttttatcatgaaaggtgttggtttatgccaaatgctgtttctatataaattgagatattcatttgattttctttgttagcttgttaatgggtttttatcaaaggagctttgaatattgacatagcctcacattcctggatgaaaccccatttggtcatagttgataaatctttttctatattgctgaattctgtctgttaatattttattaaggattttctcatctatattcatgagggttattggtctatagtgtttttgttctgtctttgtctggttttggtatcagggtaataatcaactttataaaatgaattggtaaatattccctcctcttctattttctggaagaggatgtgtagaattggtgttaatttttctttaaacgttttgtagaccctcctgtgaaaccatctggccctgaaatgtctttctggggagcgtttaaattgcaagttcaattcccttccttggcatagggctgttgaattatctgtttcatgctgggcatgttgtagttcgtgttttcaagaagtggttcattttgtctaagttgtcaaatttatgtataacttcaataatacgttttaaataaagaatccattatttttccttaattttattatgtgtgtggaatttgtgtttttacagttttattttatgatttctcagtctaaataaatattcacctttgaacctagcttcttatgattgtaattttatatgtatctttttcttaaagaaggttccgctatcccccaaaacatgcaagattcgggctgcatagaagctggatctgtccagcccctgactaacatttgtttctggcattaaatgaaacttgcctttaaatgaaacttaaatgcgtagagtgagtttccggactcacgtgtggccaggtctccacaggccgtggtcaagctcttgctgacttttgaagcgaaatcccatatgaacaaaggaaaggagatcagtcagctgccctcgtttctgtctgattggtgccaggtgatgagcgtccctcctctttatgctcttttgaatttccacagtagtcatgcttattttttcaaaaaacgaaaagaaagaagagaaagccaaaaaagaaacaaaattgggatgttcgggttggagagttagcaggggcatctccaggagggtcctgccccccaccccaaagccggcctcagggagttccaggcgttcccacactccccaggcaggacggtggacgcagcgcagacaggaagctccccgagataacgctgcggccgggcggcctgatttgctgggctgtctgatggcccgggccgaggcttctccctgcgcctgggactgcggccgcctctctaaatagcagccatgaggcgcctgggggcagtgtcctcgcgggccagcgacgggcaggacgccccgttcgcctagcgcgtgctcaggtaggagactctgcccggggctgcagctgagggtttcacggggctatgacagtgcagaggggaggcaggcaggcttccaaactgggcgcgaggtgggctcctgctgagcgaggaggatgggaatctgtccctagatccaggcaaaagattgagtctcaataaatctggcaccagagttccaaagtttgattagttcatggcggaaattcgtggagcctattgatgagatgggatccgacccatgagaggtgctggatgatggagtcaccctcttgggtggcagatttcaaacagcccaaggcccagggggctaaacagtcttcgctaattccaaaccgcagtgcagtacctggtctcacaacctgacgattgttcctgagcctgagcagcgtctgacgggccaggcggacagcagccacgactgcccccagggaccagtggctctgtgttgggctcaggaacggggatcagagaggtgggggaaaggtgggccttgctttggcaactttccagggaaagactttgagttcagatggggtcatctaaaaccaagtggggtcatcttgtctccaaaattggaaaggaggaaagtttcctagggccgctgcctcctacctggatgccttgcgctaggaactggcggtctttttagagctgaggtgatgtggtcgttctcaatttaaagatgaacgtttaaagccatctcatgtgcatagctggaattttggtttgatgggaagcactttgcctgtggtaggcagagcactgccccaatctttcacagctattcgattttgtttacaattttgaaaaatccatgtaccgtagaagagagcacaccggtaatgtgctgaccgctgggggaagataagagaggataggtgccttcttactctgtgctcttggtaagaagctaagaggagcgtgtgctgttgtgggtggaatccaggctgccccagaaggtgctctgtcactgtagggagggaaacaccgcggtggggctggggcagtccccagtgagaggaacctcctcatgcttcagggatgtggttcttaggaggtatttgtggtgcctgtaagatgctgggccttgctgtagatacttaatgaaaaagtagaatagcatgtttggcaactgaagccatgattttttctcattgtctatttcatttttttttttttttttgagatggactctggctctgtcacccaggctggagtgcaatggcaccgtcttggctcactgcaacctccgcctcccaggttcaagcgattatcctgcctcagcttcctgagtagctgggattacaggtgtgcatcatggcacctggctaatttttgtactttttagtggagaggggggtttcaccatgttggccaggctgctctcgaactcctaaccaggtgatctgcccaccttggcctcccaaaatgctaggattataggcatgagccactgggcctggccccattgtttatttcattcataacatgtatttcctctcaggattccacgtttaaccccctctcccctgcttgtcaagtctgccccttccattgatgggagggccctgagcgtcttgggccctggctgggagataaggatgttgttcttaaagaggtcctgggggtagctgtggcttctccgtttacaaaatggaattcctcttctaagaaggcagtcagagggcgagacctctgggaagcagagactccttcgggcgcctgggtgccctcaccctgtgcctacctgccctggttcctgctgtgcgtctgagagcgccccgctgcagggcctgtgcctcctttgtgcccataggcctagctggggcccctcgcaggaaagtggacagaaactctgtgaatgggcagcggggtcagtgaatgagtggagcgagtgaaggcatgagaaatcccagcctgggctgttccggggatcagtggatgagtgaagtgagggaaggcacaagaaatcccagcctgtgctgctccggggtcagtgaatgaatggagtgaaggcacaagaaatcccggcctgggctgctccggggtcagtgaatgaatggagtgaaggcacgagaaatcccagcctgggctgctccgggatcagcagatgagtgtgagtgaaggcacgagaaatcccacctgggctgctctggtgtcagtgaatgaatggagtgaaggcatgagaaatcccacctgggctgctccggggtcagcggatgaatggagtgaaggcacgagaaatcccgcctgggctgctctgggatcagcagatgagtgtgagtgaaggcacgagaaatcctgcctgggctgctctgggtttctctgctcactactcaccccttttcttgggagacggagcctgatctttgttgaagccactcctgggacatctgcggagtgagggcagtaaaagccttgctgaacacctggttatacctgaacagaatcacttctagctagaggggaaattcccatgtcagcctttgattcctgagacattaaaaaaaaaaaaaactaaacccagtttgcatccagcaaacactgagaagtgaggttcgacttgcgtactgagtgggtggggaggaagagtttactattgctttcagaagccacataccacaaggagccaaaatactgctgctgaggcaggagccggggagactacggttatgagcccagtggaccagcacgtctggctacaaaccttgtggtgccccttgttttgacattatttttgtattttttatttttattttattttatttatttcatttttttgagactgagtctcactcttatcactcaggctagagggcagtggtgtgatctcgactcactgcaacctccacctcccgggttcaagcgattctcctgcctcagcctcccgagtcactggaattccaggcacccgccaccatgcccagctaatttttgtatttttagtagagacagggtttcaccatgttggccaggctggtctcgaactcctgacctcaggtgatccacccacctcggcctcccaaagtggtgggattacaaacgtgagccactgtgcttggcccatttcaacattattaggaatttcaggacaatgacagcagggcagtaacccacgtctgcagactgcctgccctggaaatactgtgtagacattagatataataaagatttggaaacacggaaacaccacgaggagaagagcagaaggctctatttgcgatgcaattgtgaactttcgttctgttgtttgttcctttatttactcattcacttgttcactcagtttggtgcctgctaaactgcaggcttctgcgtgcccagagacctttacgaagctgtagcttgcacagatcacttgcatgtggacccaagcctggcagcgaacaaggaaggtgggaggagtgaagtcagctggtggggtcctgggtttccgcttttcggttgcccttattgttctaatatccgcgtgagcacaggggagaagggtgtgggcacaggcagcgggtgaggggtgtggagaggaggctggaggcggaccgtgggtgaggggtgtggagaggaggctggaggcgggccgtgggtgcggggtgtggagaggaggctgcaggcggagtgcccagctgcgtggcctggtggtggagttggggccgattgttcaactttccatattgcattgtctttagagtgaggaactgtaataaggtacaaggttgttttgggaattaaatcagatatgtgtccacatttggtatacaacgtatattggctccttgttctctccatcaaaaacctatttttaaaaatcccttacatcgtgactgaaggaggaaggtgagcccttcctttgatgcatggggagagggtagtcgggcagaaagaggaaacagccaacagtgctgggaagccctggatttcagtcccaccctcaccacacactggttacgcaatgctgggaagcgttcttaatttttcttttctttggcttcctcatctgtgacgagtgcgtgatggtgctgatctctgtgcagtgtatgggagttattttcctccaacccagtggacgttctgtacccctgtcctttacaaagtcatttctgtaaggggctctgcaggaagaagccaggtcctcatctggtgcgcgatgacccacaccacaggacggcactgaatggaaacgggtttccctgtacccattctgcgggagaattgactgacgcagaggcactgtgcgggggacaggcattctcagatgaggaaccctggcttctagccctttccctggactgggagcccatgcatgtgatcacagtaggatcaggagctgccatttggtgagcatttgctatgtgccacactgggtcacggtgccacacgcattaattaccgctgcaatcccttcaaatagcctatctccatattaagagaaggggaggggcttgcaaacggcatgtggtgtggccaaggtgctggtaagtggttcagtggatttgtagctgtccctcacccactgccctcaggatgccaagtcccgggaggtctctgggcagtgccatggcccctccatggcccagggaggcaagcactggcctactggccccacagtcatgagggtgagctccacgccaccagctgtgcccttcctctcccagcacccgtcagtggcatgcagtctgccttaataagattagataatccataagctacaactacataaagttgaatataaagacactgaagactatggatactgtgctgtgatatcttataaaactcaaaagcggccaggcacggtggctcaagcctgtaatcgcagcactttgggaggccgaggtgggtggatcatgaggtcaggagatggagaccattctagccaacacggtgaaaccccttctctactaaaaatacacaaaattagccaggcgtggtggcgggcagctgtagtcccagctacttgcgaagctgaggcgggagaatggcgtgaacccgggaggcagagcttgcagtgagctgagatcgagccactgcaccccagcctgggtgacagtgcgagactctgtctcaaaaaaaaaaaaaaaaagcaaaactcaaaagcaagcaaggctgggcacagtggctcacacctgtagtcccagcagcttgggaggccgagagaggcagatcacttcagcccaggagtttgagaccagcctgggcaacatggtgagaacctgtctctacaaaaaagacaaaaattgcccagacatggtggtacatgcctgtagtctcagctaccagggaggctgaggtgggaggatcccctgagcccaggaaattgaggctgcagtgagccaagatgcactactgcactccagtcctgtcccaaaaccaaacacaagcaaaacgtgacagaatatggtttaagaacgcataatgtgtaggaatcctgcttaaaccccgccagaggagaagttcgcattcaggatggcgtcccccaggggagggcgcgtggatgggagcggggctggggctttggggccggtgaggcaggtgcactcaccagtgtctgctgtgtggttagacctcgtcattgtgtagttgtatacacacattaactcctaatgaactagaaagtgaacatcaaaaatgacaccttgaggtattaataattgttgaagctgggcaatgggtatatggaagttcatggtactgcttttgtgtgtatctgacattttccattataaatgttaagaatgatgagagcctcagcaggacaatgcccggccccgtgatggctgtgtcactgcacggggcgggctcccatccacgccccttctcagaagagtcgggagcccccactttcctcttggcctttccactcctgtgctttgtgaagtcatctctacttctgattcctcgtggattcttgtaggatgtttgaagaaagggggatgtgggcagtttctgaattaacccctttttccaccacccttcccacacgggcagggggcctcggcgtggtggcagtggagccgggatttgagtagggtcgccgtggacagggtggtgtgcggaccatgtagaccatcatagtgtagccaaagctcatgggtttactttttgtgactttgagcttttggatttttctttattattattattttttttgagacagggtctcactctgactgcccgggttggagtgcagtggtgtgatcaccgctcactgcagcctcaacttcccaggctcaggtgatgctcccacttcagcctctccagtagctgggactacaggtgcgtgacactacacctggctgcttttttgtagagatggggtttagccatgttgcccaggctgatctcaaactcctggactcaagcaatctgctggccttggccttccaaagtgctgggattacaggcgtgagccactgtgactttgtgctttatagtaccttttttcccccgagccattcttggacatccgggatgagagacggcttcagctttaaggtctgtaggttttcacagaggtaggatttaagttctgtcatcttcggcaagtgaagctctcccacgcgcgtgcccaagccctggctccgccctaactctaatcctctctcccttcccgccccgccccttcatcaacccttgcctcagtggaaacggacatttaacatggaatgttcatggcagtaaccctagccgtctccacgtcatctttttgtctgtgaccattggaggcgatttttttcagatttgggagaaggatttcaaatgacttcccttcgagctgcagggctatcttgggcatcttgacctccacacatttctgggagaactcctcgtgcagcaggacatcaggtggcaaaggtgggctctcgccagccagaggcggggtctctgtagactccatggggccctggctttcgggatctgtccggaccaccctcccctggcttttgtagcagggctctcacggggctgttgatgtgggaagccccccaccacagatggcctttctctagcagctaaggtgaccttcattttggacctgagagggccagctggcttggaattgtgggagagaaaatggagggtaccctgacccccaagccttgcaaaccgaaccattgctccacccactgggtcacataggagtctatagtgtctcagactcggaaagttgaacccgagcccctgacttcacttcacctcctcagttctgtttctcagcagctggctgcactgttcacctggctgctcagaacaaaagctttaatctttgatttctctctgtcatttcccacataactgatcagcaaaacctgtcagctttgcttccagactgcatcccatacctctgtcatcacctccacccacacgtggggtccagctgccatcctcgcccgctgtgctgttgtggtcaccctggcttggtctccttgcttccgttgctgttcccctaagtcccgtctcaagagcagggagacccttttgtaaagccgctcgctgatccagaccctctgtctcatacagagcaacccccaaagctgctgggcgccggctcctgtctcctgtcctctgtgcccaccaggccagcccacctctccccgcactgtccggcatgcactgcctcaaggctttctctgagccgccctcacccacctgtcagcgaggcttccctggcaaccatcctgaacagcagcatgtgtcccggccactggactctgcctcactcttccccacggcgcttacccctgcctctgtctgtctctgtctgtctgtctgtctgtctcttccaataggaataaaaacataaatgttcttgctctactcctggtgcctagagctgtgcctgacatttggtcggcatccacaaatgtttctgaacgaatgattaaccaaacgaaaggctgccaggaagtatccggaagcatggcctttgggatggacagatgctcctgtggcttccatgctctgcggagccccagtcccagctcgccacggctctttatcagctgtgctccagggctgctgtccgcactctgcccttctggcctgtccctctctcccctcctgtccctttccctctgtttcccgggcctctcccttcaagttgagtagtttccattgccctctttgttttccgagttttatttatttattatattttatttttttttgggacggagtctcgctgtcatgcaggctggagtgtagtggcgtgatctcaggtcactgcaacctccgcctcctgggttcaagcagttctcctgcctcagcctcccaagtagctgggattagaggtgcccgccaccacacccagctaatttttgtatttttagaagacatgcggtttcaccatgttgtccagactggtctcgaactcccgactttaggtgatctgcccacctcagcctcccaaagtgctggaattacaggtgtgagccactgcgcctggtcttgttttccaagttgtaacgcccttcacgatgaagaaacaaagaggtcagcacgtacccgcccctcctgggatggtcagatgtccatgacacccctcttcctatgggctcggcccccacctccccaggcccctgggttcctaaggccggggctcctctctccttactgatctcaccgaggaaggccaggtgcctgtctcctgccacctaaggagatgtgggggcgtggattccttgtctgtgaatggagccgctaagcttggggctcctcaggcgccttggctgtttcctttagctgtatctcagcctccctccgctgtgcccagctctgcagaggctccatgtctgtggctggctatgctgtgtggagacccctactccactctgtgtaggaatcgtttgtcccagagatcagatcgaactccttggggtgggcgagccgtaggccttcaatcaaggctcactgaccagggctggcatgcacttggtgcctggtgctgaccctggggctgctgtggaagcttctcagtggaggctcatgattggtgcttgagtgagtgaggagcacccgccatgggggcccagacagcccttccaggcaccaggagggctacaccccttgcctccgaggcctgctcactgtcactggctgcccggctgttgcagttcccatcactgtttattccttcctctgtgtaggagttggtgtcctgcctgcgctcaggatgagggggaatctggccctggtgggcgttctaatcagcctggccttcctgtcactgctgccatctggacatcctcagccggctggcgatgacgcctgctctgtgcagatcctcgtccctggcctcaaaggtaaccgctccctggactctgggctgctgggcagtggcctccgggccagctgagagactcccatgcaactgcgcagttccacggaaaagcacaaagccccagcaaatctgcttaccccattgggtctcagtttccccatctggaaatcaagggttgggtgacatgatgtctaaactgtcttcggccatggaattcctaattctgaagatggcaatttatttgcaactcagccctctccggggggaccttgctggaaggcacctggctttccgtcagaccctgcacacatggcctcgtgtgatcctccccatgagatgatctcatgtggaccattttacagataaggaaatttgagggtcagagaaaatttgcaacttgtgttaagttcccaaagtgtgcttctacattgcttcctgagagctcttaatattttattttaaaaattaaaaaatccctggtggtctagtggttaggggaaaaaaaaaagacaggaacttttttttttcttgttgctttgtctgtaatctgctcccggatagagatagttctgcaggtgaggcatgggtgagaaagtccctgaggctgcggtatctgaagcctccagagcagcatcttcaagtaagaaaatgaccagcttctacaaagcagaggcaacaggtccccaagcctgggggagcccggtgtgaaatgaaaatgtgggccccttgttcaaaattacagaacccaagaagggacagcagagtgtgtgccagtgtcgggtggcagggccggggctgcaccggccgcagcagagtccaggccgccgctgaggggagtcacgtgggtgccgaggagggggcgggggagtcacgtgggtgccgaggagggggcgggggagtcacgtgggtgccgaggagggggcgggggagtcacgtgggtgccgaggagggggaggggagtcacgtgggtgccgaggaggggaggggagtcacgtgggtgccgaggaggggaggggagtcacgtgggtgctgaggagggggaggggcggccacgtgggtgctgaggaggcgggggaggggagtcacgtggttgatgagggggaggggagtcacgtgggtgctgaggaggggaggggagtcacgtgggtcctgaggagggggaggggcacattgaccttttgcaacctgaatccggtccgccccctcctcatccgcggtccgcttgggccttcagcttctcctgtggagcgtctgcggctctttttattgaaacattagagaaaagtagattcaaacccatgatcaaaacagtcaccacgaaagacaaaccctgctcagcccgtgttgtacaaaatgaaaaggtcagccctctcccggggcacagggtccggacagctcggggccaccctgccaggctgtgcagctctggctgggggcttttttccggctgtgttagccctgctgttggaaaccaagtggactgtcctgcagcccagacaagcccagtggcctttgtgcttttaattgtgataaatgtacctgctttagaaaatgtttaattatgttggaagcaacttaaactgttggatgcctacggctctctcagaagttttggtgaaagtggctttggccctgactttgtggtagcgtgtgtgggtttgtgagtggaaccttcagctttaggttggaaacggtggctgtggagagctggacttttggctgtggaggtcacgtccctgcccaatgtggtgggtgcctccgagtccctacggttgtcttccctgcgccctgccaggtcagtagcctgcactggtgggggccgtggggtgggctccagggtcctttctgggcgccgcctttcccaggtgctgttgggagggtccttcccagctgtccacgtcctgggtcccctggatgtgctgtcatttcccacatgggtagggtcccttctcaacctttgcaggctgggaagtagggcaggtctgagggtgctgtgggtcagccgtcctgcgtgacgggtcacctgtcctcccaagcctcggcctcctggtccgtgaggttggggaggcgatgccagcttggggctctgtggggatgcagtggtggcaccaggagtgggcacacagtgaccggggacccagcccctgctccttgctctgggacagtgacttacaaagcactaaccctgtgcaggcagcgagcccgaccagggagcagatcaggtgtccgtccagcacgtgccccgcgagtccgcaagcgagaggcgagcaccaggggcaaggagcggtttagaaggattcaggatacccagcatgtcaggaattgggttactcaatggagaaaatggtgtgtgccagcagacttcatccctgccggccccagcatgtgccgtagccccccagggtcgctggaggtcaaagaggagaggcagcgtgcggcacagtgccagcttctaaggaaacagacacacacgcagtcaccattcattagacaagcgtccgttgagaatccaccaggcaggctcagggctgggatgaagaagccgcggcctgtctcctcacagtcccgccgttcggccccggacacggggtggcatctggtctgagaaacacagcacgcgccgcccccccaacccccacaaccccctgtgttttggatcctgaaacctctgccaactccacatttggctggagaatcttcctgagcacacgagtcaggctgccgctgactgctggtggtgcttgagatgacatttatttgccattccaggccatttcagataataataatatattatctttacatttagagggaataatatattgtctttacatttagagagaatgacaactccttttaatgggaaaaaagtctttttttaatggttaaaaaaatggctgtaggtgagaaaacatttatctgtattaacaaatgtgtttcccagaaatatgaaaggtcatagttcttcttataggctttatcaaatgaattttttttttgctttttttttttttttgagatggagtttctctcttgttgcccaggctggagtgcaatggtgcgaccttggctcactgcagcctccgcctctcaggttcaagtgattctcctgcctcagcctcccaagtagctgggactataggcgcgcaccatcaacgcccggctaatttttgtatttttagtagagacggggtttcaccatgttatccaggctggtctcgaactcctgacctcacgtaatccacccgctttggcttcccaaagtgctgggattacaggtgtgagccaacatacctggcctatcaaattaattttaaaatcatttactgccattctttaaaacaacattgataaaaccagtaatggggcctgaataacatgcgctgtgggaggtttgctcttctgacacctgacggcctgtctgtgccgtctccccttgtgtagaacaagccaggcaggctgaggtcctggctttctcctctctgacttcccatggccctggggtgccgtggcacttgttgtggccagcagggatgtgaagtcgctggcacacgagtttgttcagcttgtaagcaggtggcgtgacagtcaagcactgtccacggatcttcctcaactggctataaatatgtcgaagtatcttaggttctcaataaaataactgacatgcgccttcctagctgggttggaaatgaccccaaatacgatctaggtaaaagctttttgttcgtagatttgtacatgatttgcagggaagccaagcaaacagtaaatgtcagccacgttttgtttctttgagcgaggagagagctgcgttgtggtgatggtggaagtgagccagcagttgaaatgttagcctctcctggtagagaaataacttgtcattagaactttatgtagtcaatcatcctgaaaatgaaaaggatgtgggaaaaatgtcattgtgctcgctgggtctacattacaaaatgcatggagtgttgagtggggacgtgtatagaaatcctgctctggagtcattacctgcagggacatacatctttatgacccctgggaccagtggacaatgaacacttcaaaccttgccaaattggccaggtgcagtgggtcacgcctgtgatcccggcactttgggaagccgaggtgggaggatgacttgagcccaggagtttgagtctacccagggcaacagagtaagaccccatctctggaaaacaaaaaacaaaaacaaaacaaaacaaaaaaacaaccctgccaaattgtgaacagtgcttgaaaacagccttggttcttaagatgcgtggacagggcaagtctacaaggcggaggcgacggggaccgtggagaaaccagggcagccccgccgtggatgggaggcctctgtactctctggtcctcagtgctgttggtcctgaaccagggattaaaatactttttctcgtgacaaccagcacggtgtcttccagggcatattttgttcaatccccatcagagctgaggaggaccaggctgggagggcttacgctgggttttgcacaggaaggaaagcagtttctgactccaggtttgggttccccacactgcaggcacagccgtgaggcatttggggtgcctgctgcccagcactggctgaaatgcgcctggccctgtacaactacagacacaggtccattaagcagagcccttgggagatggcatgtaagtggattttgtgattagctgagagatataaagaaaacgtgtgttaaatcctcttctttagaaagtcttgctgtttttaatgacttatgattctttctctcctgctttagtaacgagagtttgtgggacacagtgtaatgtgtggtgcttttcagggtctctttccgtgcctccagttgttactatgaactatttttctttgattttttttttttttttttttttttttttttttttagagacaggatcttgctctgtcactcaggctggagtgcagtggtgcacttatagctaactgcagcctgcaactcctgggctgaagagctcctcccacatcagcttcctgagtggctgggactacaggtgcacagcaacacatcctgctatttttttttttgaaatggagtttcgctcttgttgcccaggctgcagtgcaatagcgtgatcttggctcactgcaacctctgcctcctgggttcaagcgattctcctgcctcagcctccagagtagctgagattataggcacccgctaccacgcctggctaatttttgtatttttagtagagacggggtttcaccatgttgaccaggctggtctcaaactcttgacctcaggtgatccacccgccttgggctcccaaaatgctgggattacaggtgtgagccaccatgcccaacccctgctaatttttttgtagagatggggtcttgctgtgttgcccaggctggtctcaaactcctgcctttaaatgatcctcctgccttggcctcccaaagtgccaggatcacaggcatgagccactgcacctggccaaccagtttttaaaaatcagattagagacaggcagatggatgcaggtggaggttggtcagaagctatcatgacaaacttgtccttactgctttatctttaggaggagaggagacgagggtgagtagtcatgctggttagtgagtctcgctctggggttttgaagcctgagcaaggtgtggtaaagacacactggcgtgccagcacatcccagcttggacatgtcacttgattctcgtagctgtgtcttcacctctagagtggacatagtgcccgccccatgtagggggagaggtgaaattattatgcaaataagtgaatgccgtgtacaaactccaggagctttcttaagcagtatgagaagagctggcagacctgcttagtgttaattctttacgagtactgatggagcacccgccttcttcctggtgctctgggggaccgagggttgggtgagatggagctgtgtcttctcagagttttcagccagtgggagaaagagcagactgctgtcatgtaggcggtgtgaaatgctttatgaaggaaacattcttccgccctcatctcagccacaatcactattggcctggaccgtggcatgggtggtcaggttatccccatgagctccaggcatgaagtccctgggctgcctactgcctcgggctcgtggctcgctctgcccaaccacctggcttcccgtcatcccctccagcccttcccccttgtctgtgcacctgctgaccctgtcctcagaacacttcttactctgtgcctggctacccctgctcagcagcttagcctgagaaccacccctcagaggggcttttcggatcttgccgtctaaattatggctcctttgttgaggttattgcctcattttattcttgcgtccggtgttgctaatgagaattcttatgtccatctgattctcattcacaggtatgcagtctttaaacctgtttttccctcctgggtagctgacagcattttctctttattcttggtgttctgtgatgttgctctgacatgtctgagttacttttctctgattttccccgtgtggttctccgcaggccctttcacagagttctttcatggctttccttagcactgggaaatcgcagctactaaatcttcgcagccacgaaggctttgttcctctctttccggaattgctgtcagagcgacattggcatttgtgagtttttccttcaactctcaacttcgtaacttcaaaacaaacaaacaaagcctgcatttcttattagtgctgccctgtgaacaatgcttcctcctcaccgctggctccacgaggcctcttcatcctgggtcaccggggactcgcctttctgcggagtggctcccgcacagcgtctctgctcggctctttccgctgcagtgtgctgttgttcccggactggcctctcccatgttatgaggacctccattcaccgattgcacagtcagcgtccggctgctccactgttccgtcttctctgttctttcttctgcacgatgctggtgcccctgaaacctctggggattcttaatgctgagtttatcttgttagtggatatttcttgctaaactgtcaatacttctcttttcttcttacaagataagaaagcaaacttgagaactacttggagcctcagagcagcatgtgggtgttgatcgtgggtcagcccaggggcagcccacaggcttttcagtaggtggccctgcggggctggggctgtggcacgggggtgatgtggggatgggcctgccaccatcgctgtgcttttctctttgttacttggatttaaatggaaagtcccctccgtgaggccagataatcagctttggggattttgtggagggatctgtaatctcaactgagcctctctccaagacaaggtgtgtgggccacaacgtgtgtgggcggcaagccgtccaggtgccgaggcaagagaccgagggcacgagctggtccagtatgataaaatatataaaacaacaagagttatactctatatgctctctctatatatagggttgttttgtatattttatcatactggaacagctcgtgccctcggtctcttgcctcggcacctggatggctggctgcccacaaaggtgcaaatggagagttatagagaagtaaagtttacgtgaacgctggcacaattgtgcagagagggaaggtgaacttgtagcatatcagcgcacacacgcgcacacatacacgtgcacacctatgcacatgcggacacacgcacacacatgcacccacgcacccacgcacacgcatgcacacatgcacacacatgcacacacactccctgtctgcaaccattcagaggagggatagtgcaacaggtaagaaatacggccttataaaaatgactacagagccgagtcccagccagcagagtggccctgttgagagaatccggaagagcctcccggagaaccaggtgagaaggcggaccctggacaggagccggctgaccaggcaggctgggcagagggcacagagtagggaaagaccggggtccgatgtagagaccacactgaggagaggctcaagtactgcacgtcatttatagctgaatctagagacataatagaattccatttgtttcaggacagtcattttggtgtggattagagtggggggagaagactggagtggaggtgttggtgtccacaggccttcctgaggcccctggcctcactgcgcacatctctgaactgtgccttgtagggtgtctccaccagtgattcaccctctgtctcctgcacctgctgagccttggaagtgggtggacgtgcccacctggtcacaggcagcccccgtggtggaggccctggctgagcaggagcctgtgccctggggggctcacactgatggggccagtgggatgctgacatagttcatccttccctgagtaccaagcagatgaagctcagggagaggtcggggtgacgcttcccatgggggcgcctggagacgctgccgcccttctcattggtgttagggttggggagagccggcgtttagacgcggcactgtgcacccagggacagactaggagcccgccaagaggggtaactggtgagagaaacacaggccctttctaagagagaaggtagggcagggagacaaatagccctaaaagcagaatcaggggcacccagagtagcggctgggctgcaggcggggagggaggtagggagagaaggggcttggccacctgcagggacccggggagaacgcttctaactgttcttcctccacaaatcactctgagacgctgtgctggccagacgagctgctaaatggatgtgacttcttccacaggggatgcgggagagaagggagacaaaggcgcccccggacggcctggaagagtcggccccacgggagaaaaaggtacctgcagccctgggccggccctcagagctctgaggatggaggcaccgctcctgctagagccgggtggggaggtgggggtggtggttccagagaggacaggccctgccctctgggtcccagggaggcagacggcatgggacttgggtcgggagcagggaggggagagtggtccttcagcactgctccttgtgctgacctgtggggctctaggaaagaaagtgtgtcctggaactcagcagaggctcctggcccctttaagcctcatctgtaagacgggaataacagcttccagatcatttgtgagcgctaagtgaatcagtgtcgttatgaaggcggcgtggcagagtacacagataggaccctcatcactttgcgtctgtctcctccttcgtaaagtcgtgtgattctgcctgcctcgtgggactgtgccgaggctcatgggagctagatcatacgtgtaaaggaaatgtatcatgtgtaaagtagctgcacagtgcatggcaggggttaaatatatggtggctattatctttatatactccttgttactgcttaaaatttttttaagtgttttttctttttctttctttctttcttttttttttttttgagactgagtcttgctctgttgcccaggctggagtgcagtggcacagtcttggctcactgtaaccttctcctcccaggttcaagctattctcctgcctcaacctgttgagtagctggcatgtgctatcacacccagctaatttttttttggggggtatttttagtagagactaggtttcaccatgttggccaggctggtctcgaactcctggcctcaagtaatacattttttccaagtcattaaagattgtctctagaaatgctttctcagtatgtacacatcattctatgagaacatatactacagttagccaaccccccaaccaatcttttaacattggagagttaagttgtttccaattaaaaaaaattattataacaacacaaagataattaaatatatatttaagcccatacgctgttttttgaaacgtttttgaggtataatttatggtcattctcattttgagattaccgtgcaatcagttttgaccattgccctcgcccgtacccctcatcctaagcaagagctggaacattctttttttttcttttttttaaatcagctttccatttattaagtttagagaggaacaattctaagtaaagctttaaaaaatcttcaacacagatattttttataggcaatacagaaggacaggatgaccaataagggtgctcagagtaaaactcctaaagttgcacaagttgtagaagaaaatttcttataatgaaaggacatgagtatctagattgaacagaactaccagaaacctggcaaagtaaacgaaaaaaagtttcataccaagacaactgactttgaaatttcagaacacaaagataaaaacaaaatccaaaattttccagacactaaatatcacatacaaagaattaggaatccgaataacatcagtcttcccaatattagcagttgaagaaagaacagtacctttaaaatcctgagggaaacttatttccattcaagaattctacacccagctaaactatccatcaaggctgagagcagaataaaatattttcatgtatttcagttcacaacaatgtacctcatatgcaccctttctcaggaatccactgagaaatattttctttcttttttttttaaagggattttatttatttatttatttatttttagtatttattgatcactcttgggtatttctcgcagagggggatttggcagggtcataggacaacagtggagggaaggtcagcagacaaacaagtgaacaagggtctctggttttcctaggcagaggaccctgcggccatccgcagtgtttgtgtccctgggtacttgagattagggagtggtgatgactcttaacgagcatgctgccttcaagcatctgtttaacaaagcacatcttgcaccgcccttaatccatttaaccctgagtggacacagcacatgtttcagagagcagggggttgggggtaaggtcaaagattaacagcatcccaaggcagaagaatttttcttagtacagaacaaaatggagtctcccatgtctacttctttctacacagacacagcaagaatctgatttctctatcctttccccacatttcccccttttctatttgacaaaaccgccatcgtcatcatggcccattctcaatgagctgtggggtacacctcccagacggggtggcggccgggcagaggggctcctcacttcccagaagggggcggctgggcagaggcgccccccacctcgcggacagggcggtggccgggcagaggctccccccacctcccagatggggcggctggccaggcaggggctgccccccacctccctcccggacgcggcggctggccgggcaggggctgccccccacctccctcccggacgcggcggctggccgggcgggggctgccccccacctccctcccggacgggggggctgccgggtggagatgctcctcacttcccagacggggcggctgctgggtggaggggctcctcacttctcagacggggcggctgcccggcggaggggctcctcacctctgaggcggggcggccgggcagagacgctcctcacctcccagacggggtggcggtcgggcagagacactcctcagataccacacggggtcgtggctgggcagaggcgctcctcacatcccagacagggcggcggggcagaggcgctccccacatctcagacgatgggcggccgggcagagacgctcctcacttcccagacaggatggcggccgggaagaggcgctcctcacttcccagactgggcagccgggcagaggggctcctcacatccgagactatgggcggccaggcagagacactcctcacttcccagacggggtggcggccgggcagaggctgcaatctcggcactttgggaggccaaggcaggcggctgggaggtggaggttgtagcaagccgagatcacgccactgcactccagcctgggcaacattgagcactgagtgaacgagactccgtctgcaatccgggcacctcgggaggccgaggctggcagatcactcccggttaggagctggagaccagcccggccaacacagcgaaaccccgtctccaccaaaaaaatacgaaaaccagtcaggcatggcggcgcacgcctgcaatcccaggcactctgcaggctgaggcaggagaaccaggcagggaggttgcagtgagccgagatggcagcagtacagtccagcttcggctcagcatcaagagggagatcgtggaaagagagggagagggagaccgtggggagagggagagggagaccgtggggagagggagagggagactgtggggagagggagaggactggaacattcttatttcacttagcgtaatgccctccaggttcatccaggtcacaaatgctgggattttcttatatttcaagactgaataatattccgttatatatgtgccatgttttctttatccactgattggtcaacagacgcgtaggttgtttttatgtgatggctgttgtgaataatgctgcagtcagcatgaaactgtagggatctcttcaagatccgatttcattcctttggctatggacccagtagtgacattgttggatcatgtggtagttctgcttttgattttttcttttcttttttttttttaagtttttaaactttttatttgcatatttaaaaaattgtgcattccaataattaaaatcatttgacaaaaagaaaaaaatggctctctgattaaactgcattacagcctgcaggacaccttgggccagcttggttttattctagatttcactgtcatcccaccccacctcttccttcaccaacatgcaagttctttccttccctgccagccagccagacagatgggagagacaggcgcggccttcgttgtccgtagttctttgatgtgaaaggggcagcacagtcatttaaacttgatccaatctctttgcatcttacaaagctaaacagctaaaagaagtaaaataagaaggcaatgcttgtggaatatacagtgcatattggcggcgcacgcctcactacgatttgcctgcttgcttctcctgttcagtcgtttctttggaaggcagtggatttttctcttgagtctctgtcttcttcagtttcgacttatcgaatttctcgatctcagccatatcgggtttgtcagacatggttgtggaggaaaagcggagcgaggcgtgcgagaacgagagaagtctggtctgcgcagtggccaccactgagttgtcgcttttgattttttcaaggagcctctgtactgttttccattcccaccagcaatgtctaagggctcgcctttctccacatcttctccaatgcttaatctcttttgactttttgataccagccatcctaacaggtgtgaggtaatgtctcattgtggctttagtttctattttcttgataattgatgatgttgaccacctttccataaacctgttggacatttgtatgtcttcttagaaaaatatctattcagattctttgcccatttttaaattgggttatttgtttttcggctattgagttgtatgaattccttacatattttggatattaacctcttatcagatatatggtttgcaaatactgtcttccattccataggtacctttctgttttgttgattgctttctttgctatgcagaaacttgttagttggataggttagtaccacttatttatttttgcttttgttgcatgtgcttttggggtcatatcccaaaaaatcattgccaagaccaatgtcaaggaacttttcccttacattttcttttaggagttctgtgatttcaggtattacatttaagtcttctattttgagctgatttttatgtatggtataagacaaggattcagttttgtttttttgcatgtgaatattcagttttcccaatagcattgtgaattctttgtgcctttgttgaaggttagttgactgtatatgcactcatgggcttatttctgtgctttcttctctgctctattgtctatgtgtctgtttttatgccagtgcttgtttgagcaagtatactggtttgattaccatctatctgtaatataatttgaaatcaggaagtgtgatgccttcagctttgtttttcttgcttaaggctgctttggctatacatgaccttttatggttttacatgaattttaggatttttttttccatttctctgaaaagtgcctttggaattttgatagagattgcactgaatctgtagattgcattgggtagtatggacattttgaaatattaattcttttgatccacgaacagatattttttccatttatttgtgtcttcaatgtttcatagttctcagtgtacaggtacacaacacttccttggttaaatttattcctaaatatgtcattctgtttggtgctacagtcaaggagattgtttccttaatttttttcaggtggctcattgttagtgtatagaaatgctgctgattttcgtgtgttgattttgtatcctgcaactttactgaatttgtttattagtgctaaccagtttttagtggagtctttagggttttatttatataagattatgccatctgcaaacagagccagctttacctctccctttccaatttggatggatccctccctccttctttcccgcctccctccctccctctccctttctcttcctttctttctctctttccttttctttcctttcccctttccttttctctcctttccactttccttttttctttcttgcctaattgttctggctaggacttccagcactatattgaatacaagaggcgagaatgggcatccttgccttgtttctgattttagagtaaagctttcagcttttcaccagtgagtatgatgttagctgtggacttctcatacatggcctttattgtgttgaggtgcattctttgtatatgtgctttcttgagagcttttatcatgaaacaacactgagttttgtcaaacgttctttcagcatctactgatgataatatgatgtttattcttcattctgttaatgtggcatatcacatttattgatttctgtatgttgaaccatcccaggcataaattttgcttgatcatggtgtataatacttttgtttttgagacggagtcttgctctgttgcccaggctggagtgcaatggcatgatctcggctcactgcaacctccgcctcctgagttcaaccgattctcctgcctcagccgcccaagtagctgggattacaggcacgcaccaccacgctcagcaaatttttgtatttttagtagagatgaggtttcaccatgttggccaggctggtcttgaaatcctgacctcaggtgatccacctgccttggcctcccaaagtgctgggattacaagcatgagccaccgctcccggccgtgtataatctttttaatgtgctgttaaatttggtttgctagcattgtgttgaagatttttgcatctgtgttcatcagggatattggcctgtaatctttttttcttgtattgttcttgtctggctttggtatcagggtaatgctggcttttaaaaattagttcagaagtattctctcctcttcaattttttgtaagattttagaaggattggtattaattcctatttaaatttttggtaaagtttggcatgaggctaccaggtcctgggcctttcttcgattggagatttttgactacagaatcagtctcattacagatctgttcaaatttagtattttttcattattcagtctttgtgggttgtatgtttctaggaatttatccatttcttctaggttattcaaatttttgatgtataattattcgtattactctcttatgacccttcatatttctgtggtatcagttgtaatttctccattgcatttctgattttatttgagttacctcttttttcttcgtctagctaaaggttcgtcaatttttttttttgccttttcaaaaagcaactcttagttttgtcgctttgctacagcttttctagtctctctttgattatttctgctctgatcttcgttatttccttacttctgctaactttgggcttcatttgcttgtttttttctagtcccttatggtgtaaagttagattgtttatttgtaatctttattttccctccatgtaggtatttattgttataaaatttcctcttagaatatctttttgctgtagcccataagtttttgtatgttgtgttttcattttcatttgtttcaagatattttttgatttcttttttgactcatggattgttcaggaatgtgttgtttaattttctcgtatttgtgaattttcgttttcctcctcttgctgattcctagttttatcctgttgtggttagaagagacgcttgatatgatttcagtctccttgaatttgttaagacttgttttgtggcctaacgtatgagctatctcaaagaatgttccgtgtgcactggagaggaatgtgttttctgctgctgttggatggaatgttctctgttagctccattcggtctaaagtgtagtttatgtacaatgttttcttactgattttctgtctgggtgatctttccattgttgaaagtgaggtattgaagtcccctactattagtgtattctatctgtttgcccttcagatctgttaatatttgctttacatatttaggtgctccaatgttgaatgtgtgtatatttgtaatgattatgttttcttgatgaattgaccttttatcattatataaaaacccttttttactcttggctacagtttttgacatagtctattttgtctgatataaaataaatatagctacgcctattctgttttggtttcaatttgtgtggaatatctttttccatcccttcatttttagtctatgtgtgatcttaaagctgaagtgtgtcttttgtaggcagtgtatatagttgggtcttctttttatttatttatttttattaagctactccgtgtcttttgattggataatttaatctatttacatttaaagtaattattgatagttaaggatttgccattgccattttgttaattgttttctggtcacttggtagatcctttgtttccttcttcctctcttgctgttttcctttgtggtttgataattttctgtagtagtatgcattgattcctttttctttcttttgtgtatgtactaggttttttatttgtggttaccacaaggcttatataaaacattttatagttataacagtctatgctaaactaataacaacttaactttgatcacacacaaaattctacacttttacacccaccccccattttatgtttttgatatcacaatttacatcttttttattgtacatctattaacaaatcattgggccaggtgcagtggctcacacctgtaatcctggcactttgggaggctgaggcgggtggatcacgaggtcaggagttcaagaccagcctggccagcatggtgaaacctcgtctctactaaaaatacaaaaattagccgggtgctcgcctgtagtcctagctactcaggaggctgaggcaggagaatcgcttgaacccgggaggtggagcttgcagtgagctgagattgtgccaccgcgctccagcctgggcgacagaatgagactccatctcaaaaaaaaaaaaaaaaagtaaaatatattagctgggtggtatgtgcctgtagtctcggctgaggcaggaggattgtttgagcccaggatctggaggctgcagtgagctatgatgatgtcactgcactccagcctgggtgagagagtgaaaccctgtctctaaaaacaaacaaacaacaacaacaaattattgtggctatagttattttaatatctttgtcttttaacctttatactagagttatatatgatttacacataaccattacaccatcagagtattctgaatttgactattgctatcatttgaatgtttgccccctccaaaactcacgttgaaacttgatctttaatgtaatagtattgagagagtgggcctttaggaggtgactggatcatgagttctctgacattatgaatggattgatccatttatgagttaatagattaatgggttattacaggagtgggttagttatcatgagagtgggactattataaaagccaggtggcctctctcgtgggcctccttactgtgtgatgccctgtgctacctcaagactctgtggagagttctcatcagatgtggcctcttgaccttggatttcccagcctctagaactgtaaaaaagaatttcttttctttataaattacccagtcacagatattcagtaatggcaacagaaaacagactaaggcaagtatatagttttatcagttatctctacacttttaaatgttttcatgttactaattagcatccttttgtttcagcttgaagaactttcctttacatttcttgtaagggaagtctagtgggaacttctttagcttttgtgtatctgggagactcttaatgtttcctttatttttgaaggatggctttgtgagtacataatcttattgccagtttttttctttcagtactttgaatatatgatcccactttctcctggcctgcaagttttctgctgagaagtctgctgatagccttatgagggttctcttggatgtgatgagtttcttttctctttctgctttcaaaattctcttctcgtctttgatttatggtagtttgattataatgtatcttggtgaagttttctgtgggttgaacctatttggagactttaagcttcatgtaccttgatgtccacatcactcccaagtttggaaagttttttaggcattaattctttaaataagctttctattagcttctctctatattctcctaatacaacttccataatgtgaatgttagctttcttgatggtgtcctttagatctcacaggctttcttaatttcttttaatgccttttttcttttctcttctctgattgaatatttttaaatgacctgtcatcaagctcacatattctttcttttcttttgtttgatcaattctgctcttgatgctgtctgctgtattttaaattttattcattctgttcttcagctttagagtttctgtttggttctttttttaaaaaaaaatctctatctcttcattgaattcctcatttttaatgtattgtttttctgattttgttgagttgtgtgtctatgttctcttgtatctcattgagcttccttaaaatgattattttgagttctttgttaggcaatttgtagatctccatttctttgggattggtttactagagtattattgtgttcctttggtaatgtcatgtttccttgatactttatattccttgaagtcttgcattgctgttttctcatttgcaaaagcagtcacctcctctagtctttatggactttttttgggagagagatttctttacaaaacagcctggctagggattctgaggctctctcagaccatttctgtggatgcacctgctccacaccttttgcttctcttggagaggggtgaatttttaaagagtatatgccttttcttgatcccacaaaggcagtctaggtgctactagcctctcattagtttcccctagggcagtgctctgaaatgctcaagttcttgtgccttctccctccccatcccacacagtcaagctatctgtctgtgtgagatgctggcacttgccatctgtgggggtgcctttggggagctggcagagtgttgggtgaagcatgtgagcatttgggtgcccgtggtccagttgggatggttcacaggaaaggcgtctccatcagcttgttggggggcttcctaataaaatctgcagagcaattattagggtccatagcctttcttcctagctcccagtctctcccaacttctcctccatgtcagtcacctcagtattggaggtgagacaagaaagaagcagactttttttgggcagcatcctgcatggctgggggagctggaagctcacttactacactttcacttactccagtgggaaaaaacatgggccaagggggtttccctgggcactgagctgtgttgctcagctcacagttgctcagcttacagttgtgggaaacggtcacacgggtaaagtgaaactgttcttaccctcatcagtgcatctattcttggatttttttctctaacagtgtgctggaacttctccactggacttccagactcctacaaagacacttttgttcatggggagttgtcaacatggaagcttctttggggggactatggtagaaagctcctcttctgccatcctcctaacatcacccatgtgtgcatgtcttgtcttcctaattagattatacattcctcaagggtagggatttgtggatcacactctgccatcctgcgagtaagtggttccaagtccctgatatagtagttattcctaagtattagattgatagatttacagagggtcattaaacatacattgactaccccagagatatggggttaaagtctgatagactcttttcatttctacctcttaaagaatcttaatcaaaggatccacaaacacaatggtttgctgatccaaggcggcaaggattctctattaaaacctctgaggaattcccttctccctccctcctttcttccttccttctcccacttagaagtggcagcaggctttttcaggctccgaggcctgtccccactgatgttcaggtgtaggtcaggcttccatgctcaagcaggcctcaggtccctgctgaggggtgggcacggatggagggtgagcctgaggcaggatgtgcaggacagcgactgctgagacagcgttcttggctgccttgtggtgggtggggggccatggacccagcccagggcgggggttagggaaggcactcgggaggctactcgtaattcagggtttctgaaatctggagacagggagggctaggagtccataaagggatgtggcatttggcatcccagggagtcagcttaggggaggggcgtttagcactcaggggtctactctgtgcctcagcttggacccatgagtttggaaagtttcttttcttcttttttactttttttttttttttttttgagacagagtctcactctcgctctgttgtcaaggctggagtacagtggcataatcttggctcactacaacctctgcctcccgggttcaagtgattctcctgcctcagcctcctgagtatctgggattacaggcgcccaccaccacgcccggctaatttttgtatttttagtggagacggggtttcaccacattggccacactggtcttgaactcctgacctcaagagatccgcctaccttggcctcccaaagtgccgggattataggcatgagccgccatacctggcagactttgcaaagttatttaacatctctattatctgagttgtcaggcagggatagtcataacattgtatttactttttccagcagtcacagccagtcgtgacagcttctgacatctccaaaaggaagtgcacctcgtcctttgtagaaatgggatcacagggtaatggatctggaaatcccaccttcacacttaagttggaccctgagatgcagagaataggcaaccactcttcccatggccacatggcttggacagaactggagcagaagccccatttctagatggacgtggtttgctgggagggaggaatattgttaggcacaatgcggtcccagcctcagctgagcagtgcagagaccacagacgtggaaccagacagtcctgggctcgctgggcctgtctgtatcgtggctccaccacctgtcagttatgtcagcttctggaatcagcttcgtcttcccaagccccctttttctgtacctgtaaaatggggggtggggggtggggatctacctcccatgactcccagaagggttaaatggaaggatagacgcacaatgtcttggatgcggcagttgcctggtgcctggtggcctggtggttgctgttattattctccgtttgcacagaagaaagtctgagccctggtgcttttgttcatgggaactcactagggaatgagcatgacttccggcctctgcaataaccaactgacattctttctgataatcgtggctgtttccgtcagctgtaagtgctctgttctggataatgtttattctcaaggacattaggtcaaagagagaatggaatatgtttacaaggacattaggtcaaagagagaatggaataaacttaggactttttatacacaacctgggatgaatctcctccctgagacctaggacaccctgggcgctctgcctgtgtggtaggcggtgcccgggccccagggggcgcagatgggctgggaaccaggacctcagccgccaccaccctccacaccctccctggagtctcactttccagtgggacacagccctgccaactcccctggcccactggctcttctgcccgtgggcttgctagctgggtgctagtggatagctttctagctcgttgcagcgggggcacagtggcagttccctgatgaccggtcacgaacatctgtggcttccatggcattatgctgtggagactcacctggagaaaaacagtgacctctgcgggaacttgggggccaagacttcctggtttctagggtcctgggaaccactgcagtcctgggcaaactgggggctgcaactcaacttcgcctgggcatgatgacgctggtcacgatgctgtgcatgacgacactgggcacgatgatggggggcatgatgacggggggcatgacgatggggtggatctgggcatgatgatgctgggcaagatgatggcatggtgatgctgggcacaacgctgggcacgacgatgggcacaacgatgagcatgatggggtggatctgggcacaatgacactgggcatgatgatggagggcacgatgagcacgacgatggggtggatctgggcataataacggtagatcggggcatgatgatgctgggcatgacactgggcatgatgacggtctgcatctgggcatgatggctctgggcacaacgatgctgggcatgaagatgggacacgatgatggggtggatctgggcataatgactctgggcacgatgacgctgagcacagtgacgctgggcacgatgacggtggatctaggtatgacgatgctgggcatgatgatggtagatctaggtatgacgatgctgggcatgacaacagcgtgaatctgggcacgacgatgctgggcacaatgctgcacacgatgatgctgggcataacactgggcgtgatgacaaagtgggtctcagcacctgtcccagtgcttcttgaaggggctcctgaaggggaggagcatccctgggaagagcgggacctgggtgtgacagccctgctcccatgccagccctgctgttgcccagcctgtggccactccaaaccattgttttcaacttctgacatcaaaatcacagccttcacagggcgttgctgccatgagtgggcctggggtctgcagatccgctctcatccttgcgtcttcaggtcctagcatgagacctgacgtttggaaggccctccatccactgttggaaaaatatcctgaggtttcatatcttcaaatacctctgcaatctgtgggtgatcccagtctatggccaagggccccccatctgtgtcatcctcccttccccaggtgaagcggctgccccgcagggttctagagagctggtctgtgggacgaggcttccggccatgctgggcgggggctgtgttctctgcctatctatggaggtggggctctgcttcaggtttctccaggggctctcatttaaatgcagctgctggcccaggagggcggcctgagaccctgcactggtcttaacagcacccaggtgctgctgctgccagcctgggctgtccccattggtgggggtccagatgcctctgcttccgcaaagtgcatgctctgcacatggggacctggctgcagtgggggctgccctgaacaggctggctgggtgtgcgctggggctttgagggagtgtcctgttgggaaagtgagaccccccaccccccattcgaggaggtggtgcggttggatggcctattctgagataaaaagccaggccatggcccagagaaagcccagctgttaaaaatcaccgaggaagctgaatttcaaatgctctttttgcctcttctccacttcagaggactgtgtgaagtgttcattaaaattaataagaactccacacctgctttgagctgccctcaatcctcatgcgtgtccagaggacagatgggaggcgcagcactgctcacaatggtgatgagatgtgggatgggctgtggcgttcgtgcccagtgtgccgggtgccacagccagaagctcctatggcagagagggaagggatccaggggcatcaggtgctgcattcctgttgtcgcacgcagccagcgggagggggcgttgcttgcctcttgcaaaaagctttctgtcacttggaggtgcacgaggccttgggagagggaaaaaggcgttagggctcttgttctcatctgctgtccttagagaacctctggatctgtaaccacactactgtccggccaagggttagtttccaagagaagtcttcaagttgaaataagtcagctacagaaaaggttgtggtatgaagtagagaatgtgttgacaatctcagtggatttcaacggttctcaccttttcttcttcctccaaacaccccaaaatagaatatttctgtcagaaacaacagctcacaccaataggtcccagtgtgtgtggctggtatgtggaggttggggtgtagtgagggtctcctgggtgcttctggggttctcagtttaagcctaggtgctgaccaactgtacaagcttgagctgtgtgaggataaaagtaggcttatgtacatgcactcatgcacacacgtgcacatagatgtatgtgcatgtatagttgtatgtatggatacatacctatatgtatatatgtgcatgcatgtgtgcatatgtatatgtacctgtgtgtatgtgcatatgagcatttgtgtgtatgtgcatatagcgtgtgtgtgaatagtatgtatgtgtatgtgtgctcctgtagtatgcatgggtatgtcatgtgagtatgcctttgtctatgtatgtgctgctggatgccctgttttgagataacaaagccaggccacgggtccagagaaagcccagctgttaaaaatcactgaggaaactgaattccaagtgctcttacatatgtatgtatatgtttgtattcatgtatgtatgtttgtgtacacatgtatccacgtatgtaggtttgtaagttttatgtatgtgtatatgggcatgtttatatgtacatatatacgatgtgcagttacatgctatgtgtggttgtatttatacataaatgcatgaatgtgtgcatgcatcatgcatatgtgtatgtatgtgtgtttttatgtgtgcatatgttacgtgtttgcatattgcatatctgttaatatgtgtatgtttgcatgcacatgtatgtatgtggaggtgaatgcacatctctatgtgtatatgcatgtgcatgtgtgtatgtatgcatatagatgtctgtgcatgcatatgtgtatagtatgtatgtgtgcatatgtatgtgtatgcatatcagggtagtacgtatgtgtatgtgtacatgcatgtatgtgtgtatagtatatgtgcatatgtctgtatataatgtgtgaggggacttcaaaaagtttgtggaaaagtggaattaaaaaataaaaatacaaatataaactttatttctcaatataagcaccatgaagttcaagacacttttgtaagtaattacaccagccatttagtccatccctaaagaactgagggttcctcatggtgaaattcccaggaattcccatgtggtcttttttacattgtttactgaagaaaaatgagtgccctttacagattttttaagatgaggaaacaagaagtcagaaagagccaaactgggaaagttggatgcttaatgatttccaatagaaactcttgcaaaattgtccttgttttataaggagaatgagcaggagcattgttggggtgagaagggctctggtgaagcttcctgggcatttttctgctaaggctttggccaactttctcaaaaccctctgatagtaggtacatgttattcttctttggtcctccacaaagagaacaagcaaaatgccttgagcatccgaaaagcctgttgccgtgaccttcactctcggccagtctgctttgctttcctggaccacttccaactcttggtagccattgctttgactgttttgtcattaagattgtactggtaaagccacgtttcgtcttctgttacaattttgaagaaatgcaatacaatacaggcccataatctcagcactttgggaggccgaggtgggtggtcaggagttcgagaccagcctggctaacatggtgaaaccccatctctactaaaaatacaaaaattagccagacatggtggtgcacgcctgtaatcccaactactcaggagactgaggcaggagaatcacttgaacctgggaggcagaggttgcagtgagccaagattgcactactgcactccagcctgcacgacagagcaagactctgtatcaaaaaaaaaagaaaaaattaaaaaaaaagatgcttaggcattcttcaaagaattttaacagtaaagcaaagcagactggccgagagcgaaggtcatggcaacaggttttttggatgctcaaggcattttgcttgttctctttgtggagggccaaagaacaataacatctgcctactatcagggtgtttagacaaagttggcactggctcatccggtggagggagtgtttctccacccccaggcccagctgtgcccagtgcttggcccttcccccaaaggcctccctgcaaggctgaggggaccgtggaaaggggtctggtggtccaagctatgggtttagggcagaagggaataaggagggacgggagggtttgggccacctgtagccaccctaactccccaccagccgggtatgcttggtcacggctgacacaggcgagagggctcggaggggcccctgctcggagggggctctgctcggagggggcccctactcggaggggactctgctcggagggggctctgctcggagggctctgcctgctgctttgcacactctggtctcttggtctctgtctcctgcctcctgggcttgggagtagggcactgcttgtcctcccacaggaacacaatcctgcgccatgtgtccagcccctggctcttagaaatgcaggcttcccgcagttcctggcccgtggagggtggctttggctgtacccggggtggaagtctcacaggctggggcctacccacagtgggggtgcagggtttggagccctggacgtggagtcaggaggccttggtctgagtgaaatccacgccatcagtgtgcgctcgcgctcctgctcctgatgctcgctgtgacccgaggcacggaatgccctgaggtgccacttgacagacagggaaactgaggcttacagagggctgtaacttgtgcagggtttcatgggtggagcactgagatttggggccaggcctgtctgatggcagaggctgtgctcggaatcacggggcactgtgttctttcctggctcactgtatgacctgtggtggtcacctgactctctgaactcctcttctggagcagagggcagtgtctctgtctctcaataccacacagcgggcagcttccaggacagagatgatttcctcccggctgtggaggctggaagtcagggatccgggtgccggcagggctgctgctcctgaggctgctgtccggggcttacaggcggtgtcttcctgctgcgtctcacgcggcctttcctccatgcatgcacaatcccggcctctctttctcttcggtaaagccacagtcctgttggaccagggcccacctgtgtgacctctttaaagaccctgcttctagtaggactcacactggggttagggctccatcgtcagaattttggaggatgtaattcagccctaacagatggtgctgctagggacgttgtgaagctgaaatcagcgtgtacgtgtggatgtggtttcctggcacacagtctacctgggagtattctaatttatttctgaaagatggaaaaatgagcagaatcccgggacccccactgagtccccacttggagaggggcagcgtcagagcacgggaaagaaaaccaaagtcccagccctaggaacgtcaccttcccatgaaaaagcacaaacaccacgggctgaggagcgacgtgtcagaggcggattgtggcccttcacctgaacaaagagccaactatttgctaagaagcttccacctggaaaagatggggagggcgcgaggggcttcctccccacctgggagctgtttctccctgagacccctgagagatgagatgtgaagctgttcaaggacagtgacagggagagagaagcggcccacaggccccactttcccgtcttcccacccacacagctcctccctggaggacgaggccaggcccccaggctgacaagtagaccaggaccgggatggtgaggcccaggagacagtggaggagaagcccctgggcacagatgcacttggggaggctcctcccatcttcgggaaagacttattagtggttcagtccatcagttggaggaggcacgtggcctgctgctgtagacaagttaaaacctgagagtgagttgagagcatttggcctttagccatctctgaatcacacggccagatgttaaagcaaatccaaggtcatcgctcacacttggcacctgtctccggcgagtagagctcagctcctgcccttggagaagtgtgggacccagtccctgccatagggggttctgagaaacccttgcgctggctgcttgctgattgtgagggtgctgtgagcgcgtccagcctgatctggcagcctggacctcctcgcgaggggacagagcggggaccacagctgaccgacgggggagcggcgtgaagacgtggagggggaaataagaagcataaacattgaggctgtcccaaccttcctcctgatggtcagcacagaacctctggaatagtgcggtggagagctgggcgagtttgtctttggacagaaggcccgaggaagatgcgtgttcccgaccttcctcctcatggtcagcacagaacctcaggaccggtgcggtggagagctgggtacaggaggcccgaggaagacacatgtttcctgcgcagacagggcctgggacaacacgaaacagcagatgtgcattttcagggaatatcagcttttctgtaggaccctctgcgggaggccgagcagaagcacggggctcacctttcagcttcagaccacggtgagggacacctgccctcacaaactcatcttgccctaactctctcccaaaggaactgtctccaaataccagcaccttggggtcacggcttcaacagaggaatttggtgggggacacagttccatccactgcaggaggtgacggtgctcaggccgtgactgggcactcagtgtgggtggctgtgtccatccttccgaggaaccaagacactccagggtacgtcctggggaaaggcagccaggatagggcagggactgcaggtttctagctgggtgaagggaagatttcagacagataatagtttttaaatgtttagaggactcttggagaaggtgaattcagctggctttgcatttctatgggcgcaaaaccaggctggctgggcggacccagcagagcagcaacttcccagctcctccagccatgagaactgactgtaccgtgcctcctcctgcagcaaagcagggcccctcagttatattccagggagaactgcaaattgcttcccttgcagcgagttttgggcatgtataatgggttggctagttgattgaagctgtttgttccagttgcccttctctctccctgctgtggcattttactgttacagaaatcttcaggttgaaattgtcatgactcagaacagcaggaacgggtacctggcatctgccatcgggaagagcaggccagttggctccagcaggcgctggactcacaggctgccgtggagagggattcagaggagggcagggctggccccctgacgatgaaggcaacgcactgagcactctggcagggccccctctggtgtgggggccctgcccctccctctgtgagacctcctggctgtccacctggtcccggccctgcccatgtcttggaccctgtcctcactgggtgcccccagcgatagtgcctctcaccgccttgctgtgcccctgcctgccccgctgcccttgggttcctcccccagctcctcttcctcacgtgggcccctgcctcccactggacacttctctcaggtgccctcctggcccttgtcaccgtcccatgatgatccctctcccctgcctgtccccctctcccctgcctgtcccccatcccctgcctgtccccctctcccaacgtgccccgtgacatccccctctgtgcctctccagagctgtgtctccctgcgcctaccttggggaggcttggcactcagtgccagctgtgcgtgcctcatccacacatcccatcacgcacgaggttctgccaacactgcctcctgggtgtctccccaatctgggcgtttttcttatcctcccagaacccgcctgccatgacccccttcacccccagcctgctctgcccttggtctccttttgcgcctttcagtctttccagcaagtgttgccagatgcttcctgaacacaagtctgatctcgccgccctcttcgccaaccctccacatctcctgcagcacggagatgcaccacaccctctccgatgctttcctgggctctgaggacggacgaggaagtggtgtccccgttgccccttttctattcccttccctcgcacgcactgcagttgctgggccgctgtcccgacttaccggcaaaccctgagctctgatccctgcagccagcgccctgcacagctggcaacacacagcgcctggtgtgcgaagcagagtcgcctccgtcctggctgtccagctccagcctaggtgccattaggatctccctctgcctccctcgtccctgcatcgtcccccaggctggatgtggcccccagctgccagcatcaggagagcagcctgggcctcagagcagcagagtgtggctgttgtcctggctctgccatgccgggccatgtcattttcatagccagataagagaatgcatgtgaacgtgctttgtgaatcaaggctgcattttattgcaatgtaaaccactctctgcaggggcatgtgtggtttcattttagcaaagctcactgaagtctgtgttccatcctctggtttctgtctattctgaattgggggaacgttacatctgcttcgcaaaacaagactaggagttcctggcagggaagtccttggttctaaggaggcaggtggcgtcactgcaggacagagtgttatctgcgtgcgatagaaagtccttcccgccaccaccgccgggcgcagtggctcacgccgtaatcccagcactttgggaggccgaggtggatggatcacgcagtcaggagatcgagaccatcctggctaacatagtgaaaccccatctctgctaaaaatacaaaaattagcctggcgtggtggcggatgcctgtagtcccagctactcgggaggctgaggcagaagaatggtgtgaacccgggaggtggagcttgcagtgagctgagattgcgccactgcactccagcctgggtgacagagtaagactccatctcaaaaaaggaaagtccttcccaccacccactgtcttgcaggattgcccacattgaatttcccgcattgaatttcatttagttcctgcaatggtgggttataactgatcatgaagtcctaatagtgtgtaaacatgtccatgaaaaagaattgctgagttaaatcaggttgcctgtttcttttcccagtttttccctatgtacttgtttgatgtctgctggttgggttggtggtcagtggtgataaccagcagacaggtaggagcagttgctgagggcttaacactttgcgggagggagtactgagaaactccaccctctggcttagtttgttctagggactgggtgacagcggcattcttcaggcttggtccagtgatcagagagacaatcccgtgggatcttggtgtccctcttgctatgaatgagagaagggtgggggacacacaccaccccacaccaccactgcatacacctaagctggggacaggggccagcaggtcacggggatcaggcattctgctgtagagcaggtcaggtcgggaggcatctgatgaagtgtcctaggaccctcctccctggctcaagttcacacacccgagaggagccaggggcttttccacctgccacccacccaccagaccgtgttcctgacagtgccagttatgtccatgcttacagagttgtgggtgcgtggtttggtggggtgcaggagtaggagctgggaggcactgccttgctgggatggaggaaagacgagctctcgtctcacacaggcacggaggggatggaccgtggttgagtttggaacttaggggtgccccgttcagcccctccattctatagtgtgtatgacttctgggggaagtgcatcttcctttggaagctgtatcaacaggcgacctgcctgtgacagtcacatacgtgaccttgaagagatgtagagctgtctttcttagtctcttctatgtgcctgtgatgtaggaaggagggcggtcgggttatccgtgcacgtgtgtgatggaggaggccacggtgtcacctgtgcatcgaccaactttgctcttattgttttctacaggagacatgggggacaaaggacagaaaggcagtgtgggtcgtcatggaaaaattggtcccattggctctaaaggtatttgcaatgcgattcttgcctcatttcccccctgcccctagggtcagcgtctggataccctgagaataattgtagcctgaattgtctcgtctggtgctcttatttatattcggtgcatggtagataagaaatctactgcagtacttccatttttggggtgcttggagctagttgctggctctgtgcttacagggtgcggtgaagcgctccccattctgcaggattttcacagcgccccaggatggaggggctgcagctagtgtgcttgggcaagactctggctgtgtagccacaatgtccttaacaagtttggtaacagacttagagcctcacgtaaggagcggacgcaccctgctctggaggcacggcatctgttcccccagctcaggtctcaggtatttcgaggtgatgggatggttcttggtgagaacagggtgtgggatggcagcagcgggtgtgggcagcaactatggtgccagcacctgggctcagtctgcacctgcgggttctaattgcaccgtctccgctgctgcatttggctgcacggccgtggtaaggcgggcagatcagctgcgcctcccgtgatgagagactgaggccaggacaggcaaggggttgctcagaaggtgctgctcctatgcgcccccgccccccgccatctggtcagtggacgtctttggagcgcctggcttgttccaggtctatgctgggctctgggggacgaagtcggtgggagggcaaggagctggccgtccctgagctcttcaggtgtggactcatgaagtctccttggggtcccgcacagtgtagcaatgcggctaagctgccctgagcactggcggtggagggagtctgctgtggtctgtccaattcaggggccaggttcttctacctcattcatctgcctcggagcaggttggcccaggtaccaagaggctacggtctggggtttgagctgtgagggggttctcatggtttgttctgatccatggtcacagacctccccctagcccagcctgtacctggtagaaagggctctgtggccaggagagcgatggggaggggcctagctcagctgcgggcctcccctggaaaacccgtgagaggcaccttccctgccacggccaatgcagtgaagagcacgcagagaaccacaggatctggagggaggcgtgggcttcacaaacccaaataacatcatggtaaaatacttatatccccaaacttgccattttaagtattttaagtgtacaattcagggacattgagtacatttgcaatggtgtacagccattaccactatttccaaacccttttcatctctccaaagagagactcttcccactaaccagtggctccccattcctcctcccccagccccggtaacctccaatctacttcctgtctctgaatttgcctattctagatatttcacatatgtggaataacaatgtttgtccttctgtgtctagttgatttcacttggtgtagtgttttcagggttcacctgtgtggtagcgtgggtcagaatcccctgcctttttagggaataatattccaccatatggatggaccacaattattgtccattcacctgtcgatggacacatgggttctttccacctgttgccttttgtgaataacgccacattgcgtattgactcacacatggggatgtgtatacttttaccatgcggtgtgtgctctgggcagattccggcatctcctaaggggcagctggtccaggctggccttgtttggctttgcttatttgatttgcttcgtgtctgagattgtcatcctgggttctggtcaagctgtgctttcatttccaagctcccgatgctgataaaggaacacagaggaatcaggtgggtggagactgcgaaactccttccctccttatgcgaatggaattggaatctactgaagtcttttctcagaggcatttggggcctctctgtgagaataaagagaatgcattagaacttatttctattaagtcacatgacttaattttagagcagctagaaagccctgttgccatcattttgttcaacccccttgttttggacgttgaggagaactgaggggcagggtggtgaggtggcttgtcccatctaactggaggttgggtccaggccaggatggagcccaggctcctggcatctgggccctccaggacaccaggctgctacgagcagggatgggaaggaccttgagccagggcaggaaggagtgcaccgactcttggattagatgagctctcaggcctgcgtggcgctcccatcatgctccgtctggattttcctgctgtcatgagagaggtcgggtgctgctgttgggaggagtggccactcactcatggcaccagggattcatgaggcgatgtctgcagagtgttctatcagatatcctggattttccagaactgatttaaagaatgatcactcgataatccctgtcaccccatgacatgtatatggttcgtatcacataaatagtgccggaagcaggaattacctgcagaatggggctccggtactttgtagcaacaagagggcctgggataaatccgcgagacaaatcacattttcagtcttgatgtttttaacacatagaacatgtccatctctgcctggtgacttggaccttgttttttattttcaggtgagaaaggagattccggtgacataggaccccctggtcctaatggagaaccaggtatggcataaagggtccaaggatttttaataaaatgtattaaaaattgcacttttgaaaacaatgtagatctacaccatgtagatcccacagtggacacccacccctgtcacatcccacagtggacacccacccccgtcacatcccacagtggacacccacccccgtcacatcccacggtggacacccacccccgtcacatcccacggtggacacccacccccgtcacatcccacggtggacacccacccaccatgtagatcccacagtggacacccacccccgtcgcatcccacagcggacacccacccccgtcacatcccacagcggacacccacccccgtcacatcccacggtggacacccacccccgtcacatcccacggtggacacccacccccgtcacatcccacggtggacacccacccaccatgtagatcccacagtggacacccacccccgtcacatcccacagcggacacccacccccgtcacatcccacggcggacacccacccccgtcacatcccacggcggacacccacccccgtcacatcccacggcggacacccacccccgtcacatcccacggcggacacccacccccgtcacatcccacggtggacacccacccaccatgtagaccccacggtggacacccacccaccatgtagaccccacggtggacacccacccaccatgtagaccccacggtggacacccacccaccatgtagaccccacggtggacacccacccaccatgtagaccccacggtggacacccacccaccatgtagaccccacggtggatcccattcggaaggtgctttccgagaaggatctgactcttggataccagggagaaaagagaggggctggatttctgaataaaagtccttgttttaaaagctccttcggcaccgcagagatgaggaggaacggctgcttggaaggtgtgcttgccggtgtgacttggctgagtgtgagtgcgctgagatcagtgtcactgactggccgagcagcatccgctcagggcacctccaggcactcagccaacctgaggggcccggacaaagcctctgggagacagaaggacctggaggcaggtgacggcggggcaaggagaggggacgtcccatcccggggctgagctgctatcgtcaggcctagcttggtcagagtttggaggttaaatgaggaaaggaatccatccacttcccctgacagggatctctccagaaagcctctattacctcaaacctcagccagcttgaagataaaatatatttaacaaattttatcttagataaaacttccattaagaaaacccccaaaaccaaggcaaaccccaagaaagatcgagtttcaaatgtgcaagtgtgagtggagggggggtgtctcacgtatgagggcgaggaaggtggtttgggctctacgtgattgccgacgtccagaaagagggattgaacttctacaggatatgccagactgcagggtgggctgagactctgcccagtggaaactgtgggaaaaggcgtaaagcccacccgcacaccgcagcgatgggggtggatggtgaggtgctgggcaggcccaggctccgatcctggggacaggcagaggctgctgggccacggggagccccggcaccacggaggcgatgaccaggtgtcactcttcacaggaagaaggttagggtccgtccagggactaggaacaaactcgcagccggagggaatcggttggcagaactgggagggcggagtgtagctcagttgattagcgagagaagacttaggacagctgcgtgttctggacaccgtgccgtctgcgaggcatcagagggacttcccgcctagccacaggggcacagatactcgattttggagcccagactgtctgcctgggcccagatctcaggctctccatgccccgtggctctcagtgatgtcagatgtgatgcagggataggagcagcacgcgtgtggtcacaggcgtatgggaacggaatgagctcattgagaatgagatctgttgccagaaaggcctgtgaggtgttccctgttatttcagtgtgggaggtggcttcccaccatggctctgcgtcccacccatgtccctctcatcaggccacttgtgttgctcactcttgtgtgtcaggacagacaccggcttcatccctccctccctatcagctccctttcaccaccgtttcaatatatgcaagcaattcttgtcttaaagcaaaacgactgcaaagccgcagagctcctctctagcggcctcacgtgtgcagctccccagagttctgtaccccgggcccctgtctttccctccacattcctgccgcatcatccagctgggacagcccttgatcgctaggtggtgggtctgagggccgctccagccatcctcccaccagaccatggcagcacctgtcctgtgggcgcggcctgccttcctcacttcctcccaggcctcacccacggcctgcaggtgctcctggtgatgctgctctgtcctccctccctgagccgtccctcacgccctgtgtgtgcccacgatgcccagctctgccctggcccccactccccacctgacatgtcacaggcacctgagtgttggcagattccacctcctttgcccagccagcaatggaatggccccaccacctcttccattcctgacagacgccactgcgcccttcagctcccctcagccctgcagtgcccccaagccatggaggcctgctggccatccccaccatcttcctcagatgttctagcttttctcactgcacgccctcagccagacctgcttccctggttcccaaccctgccctgggctgcttcccacccctgcacctccatttctcttccccctacagctggagaggtttgaaatacatgtgtctgccctccctccactcctgtggaggtccttccctgctccccctgcctttaggatgaagtgggtgatggttattgcggcctcaaaggcccgtggggcacgtttgttgagtaaaatgtgcatttccggggaggggtcctcgcctctcttctgagtccgagtcctcatccagcgtttgtaacgcgtgggcctggcccccgcaggcctcccatgtgagtgcagccagctgcgcaaggccatcggggagatggacaaccaggtctctcagctgaccagcgagctcaagttcatcaagaatggtatgtggctcccggcgccgccctcgctccctcccacctcccagccctgtcctgagccccccggcaagggctctgccgtgcccacgcctgccctgcctgccctgccggcccctgctgcctgtggctgtgccttaagtttgttgcacacatacaagtgctcacttttcaaccctgccttaccccacagctgtcgccggtgtgcgcgagacggagagcaagatctacctgctggtgaaggaggagaagcgctacgcggacgcccagctgtcctgccagggccgcgggggcacgctgagcatgcccaaggacgaggctgccaatggcctgatggccgcatacctggcgcaagccggcctggcccgtgtcttcatcggcatcaacgacctggagaaggagggcgccttcgtgtactctgaccactcccccatgcggaccttcaacaagtggcgcagcggtgagcccaacaatgcctacgacgaggaggactgcgtggagatggtggcctcgggcggctggaacgacgtggcctgccacaccaccatgtacttcatgtgtgagtttgacaaggagaacatgtgagcctcaggctggggctgcccattgggggccccacatgtccctgcagggttggcagggacagagcccagaccatggtgccagccagggagctgtccctctgtgaagggtggaggctcactgagtagagggctgttgtctaaactgagaaaatggcctatgcttaagaggaaaatgaaagtgttcctggggtgctgtctctgaagaagcagagtttcattacctgtattgtagccccaatgtcattatgtaattattacccagaattgctcttccataaagcttgtgcctttgtccaagctatacaataaaatctttaagtagtgcagtagttaagtccaaatagtggcaatggggtcttgaattactaccttttaatttctatatggaaaagaactcactttgaccaacacttctgtaaattacattacaatataggttccttcacactattatccatgtaaaaacaattttgctttgcttcaaacccagatttcaggaaaacaacaacaaaattctccaaactttactactaaatgtgtggagtcattttgttctcttaattttttcaatagctgtattagttatcttttattttaattaacttttgtagaggtgaggtcttgctatgtggcccaggctggccttgaactcctgggctcaagcgatcctcccacctctcctgaatagctgggactgcaggcaggagccaccacacccggcttgtatgagttatttattgctgcctaacaaattaccccaaaactcagtggcctaagaaagattgattacctcccagatcaggaatcggcacagggcttagctcagtcttctacttcagggcctctcccaagctggaaccaaggtcactcctcgtgtggtttgtgcagagctcaggtcctcctgggttgttggatggagggcctcagtttcccaccagctgtgggtcacaggctcccgcagttccctgtcacaggggcccttcccctgggctgcccacaacatgacagcaccttcctcagagcagcccaggagaagagccgaagagagaagccgcagcctttcctaagctcacctggacatatcctgctgtctgcatccatttgcgttgccacaaaggaaaacccgaggctgggcaacagatcaacaaagaggtttatttggctcacggttctgcaggcagcaccagaagcgtggtgccagcatctgctcctggtgaggcctcaggctgcgtccactctcaagtggagggggagggagagccggcactcacagagatcacatggggagagggaagccacgaagaaagagagggaggtgccgggctgttctgcataatcaatcagcttagggaactagcagagtgagaacttgctcactagggtaaggactgaggacagcacccaagatactcatgagggttccgctcccgacccaaacacctatttggccccacctccaccatgagggtcacatttcaacatgagatctggagaggcccaacagcaaaccacagcacgtgccttccctctgtggtgctctaccagcttgaggcgaggcaccgggtgcagcccatacatgggggtgaataccagggggtggggaccactgggggtcagttcagaagctgcctgccacagtacctcatggtttttttttttttgtatttcagaatcccaataaaaataacaagtatcttcatttttaaaatagaacacacgtacatgtacattccctcccagctggtgttgtggggcgagagggagctgtggagctggctcccaggggtgggtgtatttgtgcacatcctgtgagggaggccccgacggccctttgttctaagttatctattctgggtgtttgtacagtgaaatgccttggaagataaagatagtgtctcccttccctgtctccccaccggagaaaagggcaggtttgcccgcagccttggaaaatagagtgtctcgttctgtggcaacaggcaggcatggttactgtccagcataataaagatgatgtctccctccag

SEQ ID NO: 119 - DNA, 93657 bp, Homo sapiens
  source 1..93657: mol_type = genomic DNA
atcaccacgctcaccctcccctccatgtcctgcagggcttgtgtctgaccctcctgctgcttgctgtgttcaagaaggcgctgcccgccctccccatctccatcacgttcgggctcatcttttacttctccacggacaacctggtgcggccgttcatggacaccctggcctcccatcagctctacatctgagggacatggtgtgccacaggctgcaagctgcagggaattttcattggatgcagttgtatagttttacactctagtgccatatatttttaagacttttctttccttaaaaaataaagtacgtgtttacttggtgaggaggaggcagaaccagctctttggtgccagctgtttcatcaccagactttggctcccgctttggggagcgcctcgcttcacggacaggaagcacagcaggtttatccagatgaactgagaaggtcagattagggcggggagaagagcatccggcatgagggctgagatgcgcaaagagtgtgctcgggagtggcccctggcacctgggtgctctggctggagaggaaaagccagttccctacgaggagtgttcccaatgctttgtccatgatgtccttgttattttattgcctttagaaactgagtcctgttcttgttacggcagtcacactgctgggaagtggcttaatagtaatatcaataaatagatgagtcctgttagaatcttggagtttggtccgttgtaaatgttgacccctctccctgcatcttgggcacccctgggataacttgtgctgtgagcccaggatggaggcagtttgccctgtttgaaggaacttttaatgatctcgcctctctgcacacatttctttaactagaaagtttcctaagcaaaggagttaggagagcagggtggcctgacatctgccagccctgagctgtaaggctgtggatgctgagcaggtccctggactcagttgtgcacggtggcacagacactgccaggtggttgccaaaacatccagtggttccttcagcaagtgttcaccctctgcagaagcctgtgagggcctgagctcagaaaccactctcctttccttctctggctttggccctgggcactgtggtgggagagtggacagtttggctttgccttctctgtacatcaatcatgggttgcaaagagaatctcagaagtgcctcttcctgagcacagtggctcacacctgtaatcccaatacttcgggaggtcgagtcggaaggatcacttgagcccaggagtttgagaccagccggggcaacatagtgagactttgtacaaaaaaaaatttaaaaattagccaagcatggtggcatgcatctgtagtctcagctactctggaggctgaggtgggaggatcacttaagcccaggaggctgaggctgcaatgagccgagatcaagcaggtgttaggtatatcagacagctgagaagacgcaagtgtgccctggggttcaaactggtacccctgtctccctgttccaggaataacatgagtgccgggacaatgcatctttattatgagaggaatgagaattgtgtatcttgacatttgacaggagcttgctttcccccaggctgtttgaggaagggcagaggaaaatgtggtgccctaagaaggaaggacagaggaggccgaacactggcgggtggaatcccactgattagtagtgcaggtcagagacctgggatggggggcattgccgtcatggaagccacagcggggagcgggtaaagcagacagggatggtccctgatggtgacaactcgcaagaggttaaggggaaagaaaaactgaaaagcttattcaatttggcaattatggcagtgtttatcttcagaagagcagttttagggtggggtttccaaagatgggattggacatatattttgaatcattaagcttgaggtctttcaaaggcctggccaagggttgctgggtggagaccacattcagaggtaaaggcagaaattgggggcccttaagtagacagcgagggaggaagaaatgaaggggcctggtgatggttagggtgaagtgttaagactgagaaaacaaggacatgtgagaagacgagggaagagcattggagagaacaaagacactggaggagatgctacttggaggtccccagagagcagggagacaaatgaacccagaacacaaatggcaaagaagaaaaatgagagaatttgtaaaagacagcattcgaacatgccgaacaagagcagggtactggtgttcaaacacctgtatctcccccgtgtaacccgtcaactaatatctttccatatttgctccagatttgtctttagaaataaaacccacgttctgaagtcctgtttgtatgtggccccagtcctgttgcctccgcctcctgtcctgaagtcgatttctgcccttctcatctatggttagttttgttttgtatgttggcatgttttcttaactttacagaaatggtatcatactgtacatatttgataattttttaaaatattgcattctggaggcatgtataaatgtagctccagttcatttattttatttattttttgagatggagttttgctcttgtcacccaggctagagtgcaatggcgtgatgttggctcactgcaacctctgcctcctgggttcaagcaattctcctgtctcaatttcctgagtagctgggattacagttgcccgccaccatgcctggctaattttgtattttagtagagacggggtttcaccacgttagccaggctggtctcaaactcctgactgcaggtgatccacgcaccttggcctccaaaagtgctgggattacaggcgtgagccaccgtgcccagcccagttattttaactattgtatagtgttccattgtatgagttctactgtttatatgctattgatcgacctgtaggggttttgcagtgtttctgtattacagctgtgctgcagtgagcatcccatcacattgtgtggatttgaggaagtattggaattcccccaattgactggacattcccaattaccctccaagtatgtgtctgtttatccttccatccgcaatctgagagttccccaactctataatacttggtgtcatcagacttttcatcttgtctgattggatgggtgtcatttcctttaggttttataattatcttttcatatgtgtattggctgtacaaggttccttctctgttcattattattaatttttttagacagagtctcgcgctgtcgcccaggctggagtgcagcagcgtgatcttggctcactgcaagctccgcctcccgggttcatgccattctcctgcctcagcctcctgagtagctgggattacaggtgcctgccatcacgcccggctagtttttttgtattttgagtagagatggggtttcaccgtgttagccaggagggtctcgatctcctgacctcgtgatccacccgcctcggcctcccaaagtgctgggattacaggtgtgagtcactgcgcccagcccaagtttccttctctgttacttgttcatatcctctgcccatttttcacttggattttttgtcttacggatatttaagcctcttaaaatatatattctggagagatgctaatctttgattaattatatgcattgcaaatgtctggtacattgtggcttgcctctcttccctgcctttaggagtgttttgctggacccaagtaatttttaaatgttaatgttattaaatctatcagttttttgcttgtatggcttatgccattgaatcttgttttaagagatccttccctaccctcaaggttttctaaatttttattttcataataagatttttagttcatctgaaatgtatttttatgattgtatttagtagggacctaattttgtttttctttgtaaccaggtgtcccagcactgtttactgaacagtctctcctttctcgctggtctgtagaactctcctgacatataccaagtttccataagtgggtggatgggttcctgagctctctactgttaatagaacttgctctctcgcaggccaatgcctcaccaggtgattgaagcagagaaacttaggtggtgaaaggagaagatggggcctgtcctgagagtttctgttcctgagatgctagaggcagagggtatgtaaatctgaagttacactggatctcctaaaacagtataaagctacagaagtataatagtgtggaatggtggtgggagtcagtaagggttaggtcactgcagtggtttaaacaagatgggctagaatcctttcacaggcacaggcagcttggagagggtgcaatagtgcatggtatcaggggtcagatgcctctttttcctttgagatcagtaagtggctttcacctcatgacctaggctggctgctgtgtgctagccgtcaagtcacactccatccagcatgaaaggaggttagaaaagggtgcatttcctcttcttaaaaacatgtctcaaagttgcacacagcacttttgcctatattcaattggccattagtcccacggccatacctgtctgagactgagagactgggaaatgtctttatttcaagtggccatatatccacctaaacaagataagggatacgtggttatggcgtgtcttttggtttaccaatgcagataatgaagttaccaaaacaatgagaaaatggggtcgtgagggatcatgtgaatcacaagctgatgtcttcaaagacggtggaaatgggccccgggaggcagcagatgacagcagtggggattaaggtagacctccatcctggggttaaaatgaggggaaggtgatggagctggaccagcagtcagaatggtcagtggttaggagaccctctgccccccaccgctgccaccattggctctctacagaatgcctgcgagtggcttagagtgaccaaggatgaggtgcagatccatgtgcacccccctgccccctctgtggacaattttcatgcctgacagcacagtctatgtggattgcaagccgatgaaactatgcaaagtagaagcatgcctgcagtttgtgattcggtgatgtgttttatgcttatgtgagtcgaatggggcggcagggtcctgtggtcacccgctgagaaggaagggtcctgtaaccactgcctttctttcagctacttgagaaaggtgttgtgagggaccgtggattttgggacagctttgaatggtggtagggaggaagggtccggtctgagtgaatggccagaaagctgtggggaagcttttaggacattggccaagagctccctgaaggcagccagggagatacttgtcagtacatgtgactaatggccaactgaatataagcagaagtgctgtgttgctgtgtgcaacactggacaccttaggaaggacctcgagacagtggttgtggactctgtagagagtaacagtgacagtagcaaacccttacccagtgccaaccttgtgctaggctcgcactaaatgagtttaccttcaattctcgtaacaataggaggtaactactattctaatttccattttatagatgaggaaactaaggcacagagatcactgacttgcccaaaatcaagcagggagtagttagtatataagcccacggtatgtggtttgtagaataggtgctcttgactagcagaaataggtcctccctgcagtgtgtaattgataacaagcatgggctgccatcttcctgtcgaggccactcaaaacacccaacaggctacgcacggtggctcacacctgtaatcccagcactgtgggaggccgaggtgggcgggtcacctgaggtcaggagttcgagaccagcctggccgacatggtgaaactccgtctctactaacagtacaaaaattagctgggcgtggtggcgggcacctgtaatcccagctactcaggaggctgagacagaagaatcacttgaaccagggaggcagaggttgcagtgagacaagatcacgccattgcactccagcctgtgtgacaaaagcgaaactgtctcaaaaaaaaaaaaaaaaaaagtatgattttataatcccagcaccttgggaggctgagtcgtgagaatcacttgagcccaggagtttaagaccaatctaggcaacatggcaagaccccatctctgccaaaaataaaaaatagtctaattttagctattcatgtgtgtgtgaagtggtgtctcttcgtggctttgatctgcatttccctaatgctgactaatgacgttgggcacctgttcatgtgcttactggtcagatatctttcttttgttacattttattaagttttaaaatttaaagtcaaagatttccctatgagaatgacttttaaaatgaccaaaaaggggaagataacattaattcttgaagagaaggcctctgagaaaaatacagttgtagcaagctgctactttgcaaatgacccatgcattttaattttcccctaaggaaggccaaggaagagtcttatcacctcagggcaggagatgtagggacttgggtcatttaataagagtggtaggtttgaaaactcaaacccagaagactccttagagtttctcccaggaggtagggaaggggccgcatccatggagagaggaggatgtgacttagagcagtggtccccaatctttagggaccagggactggtgtcatggtagacagtttttccacagataggggttggggggatgatttggagctgaaactgctccacctcaggtcatcaggcattagattctcatgtggagtgtgccacttagatccttggcgtgcacagttcacaatggggttcgaggtcctatgagaatccgatgccactgatttgacaggaggcggagctcaggtggtaatgctcatctccaccgcttaccacctgctgtgcagcctggttcctaataggctatagactggtactggtccatggcctgggggttggggacccctgatttagaggaagtaagggcatggcttaccgtgggccctggggtgttctgggaatggggaggatggagagaagagaggaggtagggaagacctccccttgctccccatttgggatttggggagaaagtcaggtctcaggctcaacagtacctgatcctgtaccatcttccaaagggaagtcagtggggttggaaggtaggcaggggttatcttctctgagccacggcacaagacagaagtttcccaccattcctgagggggcaggtggtaggtccccaagcagagagccagcagtccctctctgaggcctgcaatggaatggggtggggtgtccactgagccaagggtctgtcagtgagagctggggaggctgggctggcttgcaagcacctgttataaccaaaccaggaaatcaggttccgagtcttgccagcaagggcctacagctgccagcagagatggacagccaggagaccccaattggccacccagagccaccctcctctgcctaccccaccctccagtactccagagcctactcggaggggaacagaaacctgagaggctgaacacacacacatggagaaacaaacgtagtaaaatatttggggaatcaggaagaattatttgtactattcctgcaacctttctataggcttgaaattatcaaaataaatttttaaaaattgtaataacattctcatactaaaacactgagtttttttctttcattttttgattttttctttttgactccagcatgacttactctaacaatgggtggtctcgattttgaaatactttcttctccaagcctttcatgacaccctgtctctgttggttctgaaaatgttggattttgtctcagcccttgcttctggaaacagccaaggttaagaaaaccccccatgctttgtgttctagcagacagcttcctgcaaagagccatcttcccagagcacttaggcctcttagatgtctcccttgtttaattatgacaagagcacacacacagaccctccaaattcccattcttagtcttctaaatgattagctgagctgcttttccccactgattaatcggaataaaatgctcattaaccaaacttccctcctttccccaggtccctaaactttcctgagtcggcagacatcccctctggagaagaggttggccccagagtcgaacatcctctgatctacctgatcctgctgcccttccattccacttccccacatctgttctttctggtcgtgtttactcccctattaaaaaaacaaaaccagaaaacgtgtttgcctagatcttgagactctggaagatcttaacagtcagaggttccccctatttgcaatgatctcctttcctgccccttcctatccttgcaataatccttttgaataaagtctctccttactaaatccagttcctaaaaattaatttttttagagacagtgtctcgctttgtcacccaggctggaatgcagtggcatgatcatagctcactgcaacctcgaattcctgggctcaagcaatcctcctgcctcaactgaggctacatgcatgcaccatcatgccttgctaattttttttaatttttgtcgagacagggtcttgctatattgcccaggctggtctggaactcctggccttaagtgattgtccagcctcaacctcccaaagcgctgggattcaagcatgaaccaccgcacccagctccaattttattttgtttggcagtttcctcctactcttcttccctcctcctgctcattccttggccattttccagctgctgctctgcttttaccctagatgcacattttcagggctcagttctcattcctcttctctgcttgctcctcctctcttcccagtgtgatcctatccattcacgtggctttcacaagcgagttgccttccccagtatccctcctagcagatcctgctgtgctcagggtgtcctcctgcatatttagcactgctcacctcccagggtcctgggcacttaggagtggccatgtgactcagctctgccaaagtctagtgcttgggtcttccagaaaagctattgttctcctggttttaaaggcggggaggggcgcctcagccataatctgccattttttccttgcatgggacacagatgtgatgctttgagatgtcacagctgcttagcgaccaccaggatgaaagccgcaggcaaagcgtgtatgacagagaaggaaaccacaagtagctgccccagccacccctggacttcttttctgtttgtttgtttgtttgttttgaaatggagtctcactctgtcacccaggctggagtgtagtggtgccatcttggctcactgcaacctctgcctcctgggttcaagcgattatcctgcctcagcctcccgagtagctgggactacaggcacaagccatcatgccctgctaatttttgtatttttagagagatggggtttcaccatgttggccaggctggtctggaactcctgacctcaagtgattcacccacctaggtctcctaaaagtgctgggattacaggcttgagccaccgtgcctggcctggtcttcttttatgttattaatagaaacccctatctggttaaactattatagttgggtttctagtacgtgcagccacatgcaagcctgacctacctttcagtcagacatctctgctcacttggtatctcttccacttaggtgtctcaaaacactgttcttctctcccaccaacaccccaaatctgctcctccagtgtttaacacccccaaaaagcttgtctaagtagtttctccagaattcttcttagaaagggagctactgctgggcgcagtggctcacgcctgtaatcccagcactttgggaggccaaggtggatggatcacctgaggtcaggagttcgagaccagcctggtcaacatggtgaaaccctgtctctactaaaaatacaaaaattagccgggcatggtggcacatgcctgtaatcccagctactagggaggctgaggcaggagaatcgcttgaacccgggaggtggaggttgcagtgagctgagatcacaccattgcactccagcctgggtgacaataatgaaactccatctcaaaaaaaaaaaaagctgtatttatttaagaaaacatcttgatgagaagcatcaagtaaaaggtgaagccctaagggcatgtatcagaaaattaaatgaatagatacactgctttgtattggaacaagattttgaggctaggggatgtaaggagaagaaagtgtttcttgtagctggatattgcaataatttcacatctgtttccaggtaaataagctgggagcagaattcatcccttttctcttgtagcaatgcagccattcgttcctcattgcattcctcattatcttgggatgcatcttaagcaatggcaacagagttctccaaagcttcatccttggtgggaatagcgtctccatccctgagtcacaggtggtggttttctcagacactgcatcatcacaaaccatgaactttcacccctgcatgggacggtgatcactcaccccctcccacaaaaggacatggtgccatagtcacttacatattccttctgagggtatgttctgtgcatccccactgctggtaccaaatctgcctgccttcattggattagaaggagcagaaagccacttagactgccttagggaaacacaagattattacgcacctgttaaatatatttttctatttataactctcgctttttaaaagggtcctgtttggtggcttttcttctactaagcacagggtctggttaagcaaggggagctgaatgtctctgtatgataatacttggggagggatttggcctccacttgatatagaaggaaaaggagccaataggaggcaggtggccacatactatgatgtaacctcgcccccaagagcccccagaacctttgatcaggtcagtccaactctgaaatagtgactattcacagagaactcacagagtcagggatgtggatttgattcttactcatccatcttgctcaccattccctgtgccttgaaatctgaatatttgagtctttattcagatcttggaaattttctccccttatttattttctctgttttctctttttgagattccctcaagactggtgtcagatctcagaacttgttttttagtgtctcttcagtgttgtctcctactctccatccctttgtcttttccctgctctgtatgctaggatttttcttctagcctttttagattttattttttgacaatcttgtttgttttttttttaatttccaaaaactcatgatctttacttgctcctctctcatagctgttatttttgatggaggcaatatcttctcagctcttactgagaaacgagtaattcttgaaaggttttctatttgattaattgtctcagttttctttagcctttttgtttatctgttcatcttaggtccttttatttcttatataactctttgaaaatggctgatgatccttgcttgactgttcacatttatgaatgaagaactagactaggtgtctggagttactttccttggcagatgtcagtctggtggtgggttaaagtattatccagtaaatattcattcccttgcctgctggcctcatgagggaagcctgatcccaggccatgtcctctcacccctcttcggtgttctctgtggtgcatgggaactgcctgcactcagttcctgttcagctctgctgctgggggaccaaattgaaacaggacatgccccagtttagccaatgtcaccctctactaattaccatctcattcagctaagaaaatgtatcttccggccaggtgcagtggctcatgcctgtaatcccagcactttagaaggccgaggcggacggatcacctgagctcaggagtttgagaccagcctggccaacatggtgaaaccccatctctactgaaaatacaaaaattagctgtggccaggcacggtggctcatgccgataatcccaacactttgggaagccaaggtggtggatcacaaggtcaggagattgggaccatcccggtcaacatggtgaaaccccatctgtactaaaaatacaaaaattagctgggtgtggtggtgtgcttctgtagtcccagctactcaggaggctgaggcaggagaattgctggaacctgggaggcagaggttgcagcaagctgagattgcaccactgcactcctggcaacagagcgagactctcaaaaaaaaaaaattagtcgggcatggtgatggacacctgtaatcccagctacttgggaagctgaggcaggaaaatcacttgaacccagggagtggaggttgcagtgagcagagatggcgccactgcactcaggccagggagacaacatgagactctgtctcaaaaaaaagaaaatgtatctttctaaagtatgtgtgtgtgtgcgtgcgtgcgtgtgtgtgatagtcccttatagtgacagtttcctagcaaaacaaaagagaaacataataaaatgtgtgggaatttggtgtctagaaagctaagttatattctgctatcaatagccataaccatctggtcagttcacttctgtgggcctgtttctcatatttataaagtgaagggtttaaaacacattcatgattcccaaactagggatttggagagtagtaaagattatccaaatagtcttataatagtttttaagagctatgacaaggccactcaagctattagctgattactgcagggaatggaggagtggagcagaatatggtgccgggcaaagaacacagaactcttggcatgtggaaggtgggccctggagcacctgctgagctccccgctcagccccagctataggaccttcagccgactgtcccaggctcagcaccatgtgccttgagggtagggcagaggggcttagggggctcagccagcagtcaccacagatgtaatcttccagggatatgctctgagcttgggaggaaattcacttcttcatgccggggaacgtatgacccactttggtgtattccaggcaatgtggagatacagaaatgaaaagactcagttctcaaggggcttgaagtctgattcgctgaaataatttttagtttccagaaccacaagacagacccaagagggctgtgttggcaaaacaaatggcagagtggagctggccagaggcatctgtgcgtggcgactccaagagagcacccgactccagatggcgacactgcaggatggagcggggcatgcctgcagacaggtgtcaggtgcgaaaaacagaacaaccggacgcttctggctgcaaggacctgaagccttagggggtgatattggttaaactgaggtaggccttgtgttaatagggtctccacctgactttgtcagtttattttctcactgacaagaagtggagtagggtggctctgggtttgatttatccagcagttcaattccatctttgatttttttttttccattctttccattttcctctctggcattctttcctctcccgcattctcacttacataaagccaagtgcagggggagagagaggagagagactcttcctgtgtcatttttttaaggtcaatgaaaaccattcttaggagcccctgggcagatttctccctgaatctcattggccagaactgtgtcacatccccatgcctaagccaatcactggcaatgggtgtgggatagttgtggccagcctggacccatcagaatgtaaccctgagtctcaagggggagagtggatgccagaatgaaatcagagttccatccactttccattagaaagaaaagaatgggagaggagcagagaaggctccagacagacaactaacagtgtttgatacaataactttcttatgtttctgtaacttaaggtccattttgtctattgctagcatatataagcttaatgcctgctagattctgttgtttacactgtcctcttctccctggagtagtaccgagggtgagggagcctgtggcctctgtaatatcaggacatagaggatagggttgccggggggcacatgtggtcccttgattgccacgtttctattttggtttcttttctttaaaagaaaacttcttttattttatagataaggtctcattctctcacccagggtggagtgcagtggcgtgatctcggcctactgcagccttggcctcccaggctcaagcaatccttccaccttagcctcttgagtagctggaactacaggtgcacaccaccgtgccaggctaattttttatttttattttttgtagagacggggtcttgctgtattgcccaggctagatttgaactcctggcctgaagtaatcctcccaccttggcctcccaaagttctgggactacaggtatgagccaccatgcccagccctaaaaaaattgttgattgtggtaaacacatagcataaaatttaccattgtaaccatttttaagtgtacagataatagtgttaagtatattcatattgttgtgaaacagatctccagaactttttcatcttgtaatatgaaatcctacacccattgaacaacttcccattctcccctgcaacccccacaagcccctggcaaccacaattctattttctctttctattagtttgactactctagatacctcatgtaagtggaatcatacagtatttgtctttttgtgactggccctatttcacttagcataatgcataatgtcctcaagcttcacgcatgttgtagcatgtgacaggacttccttcgtttttaaggcggaacaatattccattgtatgtttataccatattttgttcatctaatcctccatcagtggacatttgggttgcttgtacctcttggctattgtggataatgctgttctaaacatgggtgagctaatatctttgagatcctgctttcaatttagatgtatgagatttctgggtcataagatttaattttttgagaaaccaccatgctgtttctttacagtggctacgtcatcttaccttccccccaacagtgtacaaggattccaatttccccacatccttgccaacatttgttattttctggttttttttgatagtggcaatcctaataggtgtgaggtggtatctcattgtggtttcatgaggtttaagttgagcatcttttcatatgcttttagaccattcgtatatatcttctttggagaaatgtgtggtgcaatcttggttcactgcaacttccacctcctgagttccagcaattctccagtctcagcctctcgagtagctgggattacaggcatgtgccaccatgcctggccatcttcgctcttgagcacctgtgtcatggtaggtcaaggacccctgacagtcagggtcccaggcaggagggggcacatcccttctattatcttggattctaccacccccttagagggagactacagacccccggactcttcccagagacccattgccagcacttcattctgttgatctcctcttgcacttctgcctcccccagcctggaaagagttttaaacatcttgtccctggcaaggaaaccctggctcagccagtattcttacctaatttttctgcctcgtgtccaaagtgcagctgtattaaatgtattaaataaaaggaaaaacttgggccagaagcggtggctcatggccagcactttaggaggccaaggtaggtggatcatctgaggtcaggagttcgagaccagcctggccaacatggtgaaatgccgtctgtactaaaaatacaaaaattagccaggtgtggtggtgtgcacctgtaatcccagctactcaggaggctgaggctggagaattgcttgaacccgggaggcagaggttgcagtgagctgagatcatgccactgcactccagcctgggtaacagatggagactccgtctcaaaaaaagaaaaaaaaagaaaaagttggagggctttaccatttctgctgggaagtctggagcaaaggccactggcagtgccactcagcttgaacatagtgagggtgggtgggagggcaggaatacagtgttccttcaccaggttgcaggtgggcatcgacctcttggtggtctggcgcagcctccctgcctggggccgtctgccttgggctcgtcactgcccaaggatcagatgagctgctggaggaggaccctgagccagagttagttcttagcttaaactctacagccgtgcttctcaaagtgtggtcctgggggcccatgaagtcaaaactattttgtaataaaactacattaccttaccattctccttctattacaagtgtacacaggagttgtccagaagctgcatgatacgatatgtgatatcacaagggattgactccaaaagcaggtcggagaatccagctgtcttcttcttcttcttcttttttttttttttgtggagacagagttttgctctattgcccaggctggagtgcagtggtgcgatctcagctcactgcaacttctgcctcctgggttcaagcaattctcctgcctcagccaccagagtagctggaattacaggcacgcgccaccacacctggctaattgtgtagttttagtagagatggggtttcaccatgttggtcaggctggtcttgaactcctgacttcaggtgatctgccagccttggcctcccaaagtggtgggattaccgatgtgagccaccgtgcccgacctcacctcctgggttttcagcaattctctctgcctcagcctcccaagtagctaggattacaggtgcccgccaccatgcctggctaatttttgtgtttttaatagagacggggttttgccatgttggccaggctggtcttgaacttctgacctcaggtgatccacccacctgggcctcccaaagtgctgggattacaggcgtgagccactgtgcctggccgaatccagctctcttctattaagatattctttttattctagtaaagagaattgcaaaaatgtaaacaaatgccagtcttcatgaaaggtttttggtttgtaaaaatatagctattttcaaaaaacttatttatgttaaaatgaaatgtttatttttgttattttttaaaaagttgatacataaataaaattctcagttgtaatttctcaacaggatagagctaacccacataacaaaaggtctttgcagtcctcagtaagttttacaagtttaaaggggtcctgagaccaaaacgtttgaggaccactgtccctccggaaggctgcggctttcttctggtggctttacacttctgctgtccttcagccacgtccctttcgcgtctccagggactcctccatttgccttgaatttctcctgttagctccactccagggtggccacatgagggcagccgattccgccctgagcccttgcgggggcctcaagcacaggtgttcaccaggtcagccttcagcatccagttcctaccgagtccctggctggtggtactggagaagcaaagacgataaaccaggtccttgttctgtgggaggctcaggcctcctgttctctccctcccaggggccaggagagaggccccagccagagcctgagcacatcatagggttgacatgtttggtgaatgaacattatctctgtgttgtgcagagctgagcatagaactccatcttctagatcctgaactttaacctggaagggttaggccttcttgccattgcctgcagggagaggtgagcaccctagaacacttactgttcgggagcacgtggttctcatgcagtaaagtgagaaggggagaggaggcaccttttctctagtcttggattaaggtggaagtaaagggcatatgtgaagtttttcccaaaactaaggcctcatttattttttattttttatcagaacaagtcatggacatctctagcaatgaaagcaaagccctgcagtcatttaacatagacatactctctacatcctgttagccagcggctcctacgacttctcccaacaatcttaaagcaacctggcatgaaggagctggctcaaatgctggtcagtggaaagggcataagctctgaagtcacaacacaagggttcaaatccgaccctcccggctcctggtctgtgctctctcccccttactgtaatgccaacttcactttggtttttacccctgcaaatattcatcattgtgttgagtcaacacaatgatacataaaaaatcagcagtctctgataaagtgtggcctactggttaagaggagcagggctttgaaaggatagccaaggtaacactcctggttccaccatgtgttagctgtgtaacctcgggcaagctgcttaacctctctgagtctcaattttctcaactgtagaaagcagacataatattacagggttgctgagagaataatatgacattaggtttctaaagtgcttaattcagtacctggctcatagtaagtgctcaataaacaccagttataaacatcactgcatttgaaattcacagctttttcaaagttagagtcagaaagaatttcagaagtcctgtaattcaatgttttccaaagtgtgttcaaaacactcacttccctcaagatgctccatgaaaaagggttctgtggccaaatatgatgggttgtatattaaagcctcagagaagccacagagtaaagaaacctgttgaactttgattactccaacctttatcaaatggatttgactgtagaaccctcttcacacatcactttttaacttccaggttgctggtagacagagctcagtcattaaccatcattaagaatcataacaaatactggataacatttatggagggtttgctctatgccaggcactgtgatatgcacaaggcatgtattatctcactttattcataacaacactaagaagtagtgctatcatcttttacggatgaaaaaataggcttagaagactaagtaacttggccaaggtcacataccaagaaatcgtcagcatgcaaactcaggttggcctggctctggaattcagccttgccacctccctgtatggtttccgcagcccactgcattacccctgactgttggacagtccttccttgtattgagctgaaatccaattccagttccaatcacactgtttctccagggtgcacataaatatatggtgaaatgtattatttagtttcaattctaaatatcctttatttgtcattgtttctcgaattgtatttattctgttcccttttctcttgacttgctcaagtacttcagcatttcatttggactaaaaaactcaacacaattctgtctgctttcttatagtatgatattttcatttttaggaagtgacacattatcaaaacccataagaactaaatttttttaagagggggaaaaagacaaggtcaggaggctgaggtgggaggatcgcttgagcccaggagttcgagaccagcctgggcaacagagtgagaccctgtctctacaaacaccaccaccaccaacaaaaaaaaaattagttgggcatggtggcacatgcctgtggcacatgcctactcaggagcctgaggtgggagagtcacttgagcccaagaggtcgaggctattagtgagccatgatcacaccactgcactccagcctgggcaacagagcaagaccccatcaaaaaagaaagttttagatgtatacaataactaagttattttccctgcaggaattttgataacaaagttgtcttttatagctctagtagtattgctgtaaagctataaaagtacctctggcttttgcccaagtgtagtagtgtctgtctctctctctgtctctccatagcagcacattgttaactgtttcttaccagtagcactactttcattacttttatgactcattgtctcccttatttagtaaacaaagtatacagccactaaaagcaagtagctgggctattcacagcagcttctcccccatacactgtggtagttcctaactacaatctgtttgtgtccaatagcagttcctagtgatgcaaatagtactttccatttaaacaatttcattatagccaattctagttctgaaaataccactggaagaaaaacacttgagttctcagtatggtttgaccaatatagcttggaactatcactttccttgttctgaacattatacttcactagttcagctcgagatctcattattttgggtaactgcattaccctatacctgcttgtggagtttgtctccaaccaattaattttcccctacaattctgctatacatcagcagttgtattttggagcccacgtgaaaggaaactatacttacatctgttccagttcatctgtttaggtctggctcgttgttcagcctgtgacaatcatctgggagtggcgatcattctccttcagcccatgtcctctgtgaaactgataaacctgccctagagcagcactttccaacagaatgttctgtgaacatggaaatataccagatctatgctgtccaatatggtagccactagccacatgcaggttttgagcacttgaaattaggctcatgcaactgggaacttaattttaaattgtctttaattttaattaatttaaataatcccatatggctaatagatatcatactggacagtgtcgtagctctagatgtttacctgaaatgcaggtaaaaatattaagtagaacagggacctgcttctgtccctggagtccaaactctggactggggatggccattcaaggattatcaaccacctgtgtttataataactcggtgcacaattttatccaccagcgtatatgagtatcagtgaaggactttgtcaaatgccttgtaaaaagcaagatggcctagaaatatgtggcactgccctgctctaccagcctcatgatttttttttcctagaaaatagggtgtgtttttttttctatttgtagaagtcatacatacctactgtggcaaaatgcaggaaagtacctagaggaaattaacaatgaccaaaattctgccatcttgagataactactgttaacatttcagcatttttctttcagctttttttctgtgttggtatttttcacatcactgaaatcataccttctctgttacctcctgttttttttaatttaaaaaaattaaaaaaaatttaatcgacaaaaatatatatgtttatcatgtacaacatgctgttacactgtggaatggctaaatcaagttaataagcacacacattacttcacatatatatcatttttttgtagtaaggacacttaaaacctactcagcaattttcagtacaataaattgttattaactgtagttacataaaccaaaaataaaattctaaggccctgcaaccatctgaaaggatccctcctcctggctagggcattccaaagttagcctaaaaactggttcaggccatgatgggaaaggagggtcggacatgcctcattatactcttctgcctttgggatttcaggaaaagctgacgagcatttaacatcaacacaggaccttaagtccgctaagaaacatttacaatctcttctctgtgaagcttgcaacctgaaggcttcacctgcatgatcaaactttggtctccacaaccccttatcataatccagacattcctttctattcataataactctttcaaccaattgccaatcaaaagttttaaatctacatagaacctagaattcccctcacttcaaattgtcccacctttctggactgaagcaatgtatatcttacatttttatgtctcatgtctctaaaatgtataaagaaggttgtgccccgaccaccctggggacatgttctgagggtctcctgagggctgtgtcttgggtcattggtcactcatatttggctcaggataaatctcttcaaatattttacagagtctgactctttttgtccacaacaccatgtggtacaatagatctcttgaactcatcccgcttatctaactgaaatcttgtatccttttactaacacctttccaacccttgcctcccagtccctggcacccaccactctgcactccgcttctacgaatttaatgtgttttctcgtttgtttgttttttgttttttttctgagatggcgtctcactcttgttgcccaggctggagtgcaatggtgcgatttggctcactgtggcctctgcctcccgggttcaagcgattctcctgcctcagcctcccataccagttcaactttttcagattccacgtgtaagtaagatcatgcagtgtctgtctttctgtgcctggcttatttcacttaatataatgcctccaggttcatccatgttgttggaaatgacaggatttccttcttttctaaggctgaatagtattccattgtgtgtatataccacagtttctttatccattcatgcactgatgaacacctaagttgattccatttttggccattgtgaataatgctgtaatgaatgtgggagtgccgatatctcttggacatactgatttcattttctttgtatgtgtatatattatagtagcggaattgctggatcatatggtagtcctgtttttaatttctgctttttatattttctttatattttaaaaattttaagaatttttataagtatttcttacattattaaatactctttgaaaacaatcttgaaggctgtatcaatggttaataatttgcatagcaattcccctgttgctgtactttcagcttgtatctaagtttttgctattacaaataaaactgtgctgaatatcttcttgtacaaaataacttcctgaaggtgtattattaaaactaagaatatgaacattgttgaggctaactcttctgaaagaggaaataaggttatcctggaccacatgctggctcttagtggccaattctttcccttctgaatattcaaggccacccatttcatcctctcttttagccactcatcccatattaatgtcaagctcaccttaatatactttttagattctaatttcttagcctttttgaaaatcaggaagacattgcctgcctcgtcagtcttccagcaatatttctgttcatgaaggtttcttaaaaatgaagtctcctgatctgtgagctccctcagtagccttgaatatgacatttacaggtcagaagacctgagttgttctgaggcagcagggtgctttcttactgcctcctcctgtgcttggagcttcaatttctctttccaatagtgctcttcaactttccaccctgaccgtaattctctttaataagggaaaccacaggagtgtgtggcagagaatatcagcgctgggcaaaactcatgctctcctctacttcccaggcacacagctgggggacatctcccagactcccctgcagccagctgtggctatgtcattgagggccagccagtgaagcgtgggcagaagtgatgtgtgcctctgccggcctggccattaagacccccgcatggagtggagacgacacccagggcgaccttggaagtggcatgatgaagagaccagagcttttgtggagcagtagtgcggaggaggagcacctgctgaaccactcactccccgacagttgtgttggattgtggacctgttttctctttgcccactctgggctcatttgcaattataacctcgttgcttctgcttgagctatctttcctttgtcttggatcatgggatcaagcatgcgtaatttttctccaaataccttgggattcttcttcctaactcttggtacagagtccagctgtcccaggctcctggatgacagggagctttctctcactctcatctgaccaacaggttcccctagcggtacataattagatccaaaatggtgcttctctttatcattttctctgctttctgagaaatggaattgtcattttggcaagaatttggcagaaattgtatttcagattttaatacaattgagaaaaaaccattcataaccacagttgtctggtacgtaatgaaggtagatcttgccgaatggaacatccttctctgcaacttggtgggtttgaatggctgagtttggcagaaggaatggtagagaaatagatgactctacagaataaatggggaaggatttggagttctggaagcaatataaaagggaaggggtaaagaggagagatgggaagatgaggagccagctggatcactctgtaaggggagctagcctaaaatcctaatgggaccggatggctcaagagcttttgagaacactggtgtccaatatttcatttgaagttgttgagtagatctcctccactcccctgaggggttggtgccaggctggacagggacagcacacagatggtgagacagcccacaagctgaattctccacttgcagaggctgagaaccagcgatgactgtaaatgtgagtctctgcccgccttctgccctggcctccctcctgagaactggccagacttttgaggaggaatttagacttccaaagggtggagaatagaagtttcatccagtcttatctagggaagctcccgctgacatccaaattacataataaacacggccagtaaaatactactgctactactatcataaaataaaataaggaattaagtagataggtcaggaatttggccccttaaaacactgaggccagagagattacacagtgtgcctcagggatgttttgctctgttctcaggttatctggctcctattccttgtgtcctcagtccttgcctgggaagagagtgcagtgagcagggtagctcctcaccccctctcctcaggtaccaggtgctcctgggccctcaagggctcagctcttccctccgcagctcctgcaggggctgttgggtttatcagagactggttctgtcaaagagctgagctcaggggaacattttgggggagtgaggttcctaccaccttggagatagctttttccaaacaaggggaagcatttgagaaatatgttcattagtaagttcgtcagtggtcataaagatattttgtctgatggcagaaggcctgaatctttgttcccataaaagacttactcctctaaccagaagaataaacgaaaggtggtgagacactggggacatctgggcagccatggagaaagagtttgtggatctgacccactgttctcctcttgtccagataaggacgtgtgtttgtgtgttgactggtgaggacaggaggaggtttcctgagtgcagagtgccaaagcacaaagcctgagataaaaaggcataaatagacctagagcctgacccagagccaggcccagtgtccttgggctggtaggacttgcaggccaggtcccagatggggagggggtactggggctgagcagctgctatggaaatttccatgggctgtacaccagctcttggtaagctcttgcactcagcatggcatggggaggacatgggttatgaaagaggcacaagacttagtccaagcttataaggagctaggcctctagagaaaaaactcaggcttgccaaagcagcaagtaaacaaacaggttggaaaattttgaaacaaagttgtaaataaggtcaaggcatggaaccagtcaagaaaagtcaatatcgtattccagttattagaacctcatttcaccttctaaggacaatgttgaaaatacaaacttcacattaagataaaaatgggttttattactttaaatactaataaagaggtgacaatatattagttttttaaagaaaaaactttttataattaattgccacttgccagagtttgagattttcttaagaattcaggttaaacttacaaaatcatttttaatacagaaatcaatgaaaaatgatccaaagacattagtttcatgcattggtaatcgttaccaaaagccttacagtgtgcaattttgtaaagtcaatgttgcaactatcccaggaattggaggtctgtgtttttcccctctctagtaagattcaggtcgtgtgtgtgtgtgtgtacaagtgtgttcacacgtgtgcatgtgcaatgtatgaacccacaatgctgaccataatgctggactcccaatgcactggttaggatgcctttgcttgtatttaaagaagccatgaagaggacatattagttcacatggctgaaaagttaagtgttagggcagccttctaataagctttaatcagggctccagttccatttctaattctgtctgccttgccctgttgtggccagattccttttcgggctggcttattcacagttgcaagatgtctgtgaacagcaactcagccaacaacaactcgtctaaggagagaggagctattgtttcctacagccgttgcatagaagtcctgagcttccttctgattggaccaccccaggaccagtcattgagggcgtgccatgtgctgactggctgagattcaaaaacctatcatcttgtcaagtggattgggattgacttatatcgggggcatgatatggtttggttgtgtccccacccaaatctcatcttgagttgtagctcccatcccacgtgtcatgggagggaactggtgggaggtaattgaatcatggagagggtcttttccatgctgttcttgtgacagtgaataagtctcatgagagctgatggttttataaacgggagttcctctgcacaaactctcttgcctgccactgtgtaagacatgactttgctcctcattctccttctgccatgattgtgaggcctcccacgccgtgtggagctgtgaatcaattaaacctctttcctttataaattacccagtctcgggtatgtctttagtagcagcatgagaacagactaatatggtaaattggtaccagtagtggggtgctgctgtaaagatacccaaaaatgtggaagcgactttggaactgagtaacaggcagaggttggaacagtttggagggcttggaacttcctagagacttgttgaatagctttgaccaaaatgctgatagtgatatggacaagtaacatctaggctgaggtggtctcagatggaaatgaggaacgtgttgggaactggagtaaaggtcactgttgctatgcaaagtggctggtggcattttgtccctgccatagagatatgtggaactttgaacttgagagaaatgatctggggtatatctggcagaaaaaatttctaagtggcaaagtgatcgagaggaagcagagcataaaagttcggaaaatttgcagcctggtgattccatagaaaagaaaaacccattttctggggagaaattcaagccagctgcagaaatttgcacaagtaacaaggagcccaatgttaatcactaagaccccacccaaatctcttcttgaattgtagctcccataattctcacatgtcatgggaggaacctggtgggaggtaactgaatcatgggggcgggtctttcccgtactgttcacctcttgagatctgatagttttataaaggggagttctgcacaagctcttttgcctgccctcatgtaagacatgactgcttctcattggccttccaccataattgtgaggcctttgcagccatgtggaactgtgagtgcattaaaactctttcctttataaattacccagtctcggttagcagcgtgagaacaaactaatagagggcaccacccctagagctgggtgagaccaatgccactcaaattgatggtgactacacaatggggaggagaatgggtgataaacattcccaatgtctaccacaccttggtagccatttaaactttttttttatttaaagcgtactgtctaggtttaaggtactgtaagagatataaagatacacagttgacaatctattagatataaaaagacaagctgacaaataactacaatacactattattaggtgtaatgtaaaaatgacacatgtaaatgctaaaacgaagtacagtaaatgtaaaggagagagacagattgtttctgaggtgatcagagaggtgtcgcatagcaaataacactggaattaggtcttaaagagtgagtgggattttaattattatatgggaggcaggggagctttaagagtaaagccccagaggcagaaagccaagggaagagttggagaaatggcccaggtaagttggagcacaagttctagaagttgctgctaaggcaagaaatgtttccccaatacaaagatatctcagagttcagataacacctgaggaactaggataataaagtcagggtgcaaggtgaatatgtctttattttctcccataaagaaacctggcttaagcctccatttacctgattagtgggaaattcagtatctccttcgtggggctcccccaactccttgtgttcaacccaacgctttacacagtccaaagagggagcagggccagtctgactttcacatgcaggcagaggccactggtctcttgtcagtctggtggacaacacgcatccccaggtctctgtggcttctcagggaggacagtatcactcatgtcactttgaacttggtcgtgagtgttccttttcaggatccagggccattatctcagagctctgcccttcagttaaattcagtttccccatttgccaagtcactcgctgtcccaaggactttggataagaagtagcttgggatatccatgtggatgcagaattctttcatttatttatttatttagagacagtgtctcactctgatggagtgcagtggtatgatcccagctcactgtaacctctgcctcctgggttcaagtgattctcctgcctcagcctcctaagtaactgggactataggtgcccgccagcatacccagctgatttttatatttgtagtagagatgggctggctcatctggccaggctggtctcaaactcctgacctcaggtgatcctcccacctcagcctgccaaagtgctgagattacaagtgtgagccactgcgcctgggcctggatgcagaattcctatcctctgttcctccctgggatccaccgcaccccagaaagtgggagattttccttgctggctgtcccccaacccccctatgggcttcccccttgtgcaccctttcctggccacacatacccccctggggttcgtggggtggaggcacctctctgaaatgcttggcatctttctctggtgcaaggaaagaaaataaaacccaaagttcagacaccactgggacattctattctacttggatttataggtccacgcctcttagtctcttccaggattgcttatttcacccaagggagccaggccctcctgtgctcttttattaaaatttcatattaacatttaaccttcttggtcattggcaaaatctgtgtccttagtctgtcctcaccttgaagttgaaattcttttatttgcagccacttagaccctgccttgatggcatttcctgcccacagcaggctctgaactaagtcttgctgtctgttttggacacatggtgactctctttctgagatggagtctcgctttgtcgcccaggctggagtgcagtggcacgatcttggctcactgcaacctctgcttcccaggttcaagtgattcttctacctcagtctcccgagtagctggaagtgcaggcgcatgccaccacacccagctaatttttgtatttttagtagagatggggtttcaccatattggccaggatggtcttgaactcctgaccttgtgatccgcctgcctcggcctcccaaagtgctgggattacaggtgtgagccactacgcccggccagtgactctcttttctaaactccccttcacaattttgctctcttcaccctgcttctgtatactcacaaggaagtgggtaacagattgtcggaattaggctcggctcatggtttgcagcttctcgcctgtttgctgcttctctagtttaaaaacttggggttccaaatgtggaaattactccaaaacttaggtgaattagaaacaagtatccagtgactgtctgagggagaacaaagtaaaatacatattcagcaactaggcaagtaggatggcttccccaatacagtagagcatttaagaactggagaatggggtgctgagaagaatgtatattctgttgatttggggtggagagttctgtagatgtctattaagtccgcttggtgcagagctgaattcaattcctgggtatccttgttaactttctgtttcgttgatctgtctaatgttgacagtggggtgttaaagtctcccattattattgtgtgggagtctaagtctctttgtaggtctgtaaaggacttgctttatgaatctgggtgctcctgtattcggtgcatatatatttaggatagttagctcttcttgttgaattgatccctttaccattatgtaatggccttctttgtctcttttgatctttgttggtttaaagtctgtttttatcagagactaggattgcaacccctgcctttttttgttttccatttgcttggtagatcttcctccatccctttattttgagcctatgtgcatctctgcatgtgagatgggtctcctgaatacagcacattgatggatcttgactatccaatttgccagtctgtgtcttttaattggagcatttagcccatttacatttaaggttaatattgttatgtgtgaatttgatcctgtcattatgatgttagctggttattttgctcgttagttgatgcaatttcttcccagcatcgatggtctttacaatttggcatgtttttgcagtggctggtaccagttgttcctttgcatgtttagtgcttccttcaggagctcttgtaaggcaggcctggtggtgacaaaatctctcagcatttgcttgtctgtaaaggattttatttctctttcacttatgaagcttagtttggctggatatgaaattctgggttgaaaattcttttctttaagaatgttgaatattggcccccactctcttctggcttatagagtttctgctgagagatcagctgttagtctgatgggcttccctttgtgggtaacctgacttttctctctggctgcccttaacattttttccttcatttcaactttagtgaatctgacaattatgtgtcttggagttgctcttctcgaggagtatctttgtggcgttctctgtatttcctgaatttaaatgttggcctgccttgctaggttggggaagttctcctggatatatcctgcagagtgttttccaacttggttccattctccccgtcactttcaggtacaccaatcagacgtagatttggtcttttcacatagtcccatattttttggaggctttgttggcttctttttactcttttttctctatacttctcttctggcttcatttaattcatttgatcttcaatcactgataccctttcttccagttgatcgaatcgggctactgaaattgaccacatagttggaagtaaagtactcctcagcaaatgtaaaagaacagaatttataacaaactgtctttcagaccacagtgcaatcaaactagaactcaggattaagaaactcaaaaccgctcaactacatggaaactgaacaatctgatcctgaatgactactgggtacataacgaaatgaaggcagaaataaagatgttctttgaaaccaacgagaacaaagacacaacataccagaatctctgggacacattcaaagcagtgcatagaaggaaatttatagcactaaatgcccacaagagaaagcaggaaagatctaaaattgacaccctaacatcacgattaaaagaactagagaagcaagaacaaacacattcaaaagctagcagaaggcaagaaataactaagatcagagcagaactgaaggaaatagagacacaaaaaacccttcaaaaaattaatgaatccaggagctggttttgtgaaaagatcaacaaaattgatagactgctagcaagactaataaagaagaaaagagagaagaatcaaatagacgcaataaaaaatggcaaaggggatatcaccactgatcccacagaaatacaaactaccatcagagaatactataaacacctctatgcaaataaactagaaaatctagaagaaatggataaattccccgacacatacactctcccaagactaaaccaggaagaagttgaatctctgaatagaccaataacaggctctgaaattgaggcaataattaatagcttaccaaccagaaaaagtccaggaccagatggattcacagccgaattctaccagagatacaaggaggagctggtaccattacttctgaaactattccaatcaatagaaaaagagggaatcctccctaactcattttatgaggccagcatcatcctgataccaaagcctggcagagacacaacaaaaaaagagaattttagaccaatatccctgatgaacatcaacggaaaaatcctcaataaaatactggcaaaccgaatccagcagcacatcaaaaagcttatccaccatgatcaaatgggcttcatccctgggatgcaaggctggttcaacatacgaaaatcaataaacgtaatccagcatataaacagaaccaaagacaaaaaccacatgattatctcaatagatgcagaaaaggcctttgacaaaattcaacagctcttcatgctaaaaactcgcaataaattagctattgatggaacgtatctcaaaataataagagctatctatgacaaacccacagccaatatcatactgaatgggcaaaaactggaagcattcccttcaaaaactggcacaagacagggatgccctctctcaccactcctattaaacatagtgttggaagttctggccagggcaatcaggcaggagaaagaaataaaggttattcagttaggaaaagaggaagtcaaattgtccctgacatgattgtatatctagaaaaccccatcgtctcagcccaaaatctccttaagctgataagcaacttcagcaaagtctcaggatacaaaatcaatgtgcaaaaatcacaaacattcttatacaccaataacagacaaacagagagccaaatcatgagtgaactcccattcacaatggcttcaaagagaataaaatacctaggaatccaacctacaagggatgtgaagggcctcctcaaggagaactacaaaccactgctcaatgaaataaaagaggacacaaacaaatggaagaatattccatgctcatgtataggaagaatcaatatcgtgaaaatggccatactgcctgaggtaatttatagattcaatgccattcccatcaagctaccaatgactttcttcacagaattggaaaaaactacttgaaagttcatatggaaccaaaaaagagcctgcattgccaagtcaatcttaagccaaaagaacaaagctggaggcatcatgctacctgacttcaaactatactacaaggctacggtgaccaaaacagcatggtactggtaccaaaacagagatatagaccaatggaacagaacagagccctcagaaataatgccgcatatctacaactatctgatctttgacaaacctgacaaaaacaagaaatggggaaaggattccctatttaataaatggtgctgggaaaactggctagccatatgtagaaagctgaaactggatcccttccttacaccttatacaaaaattaattcaagatggattaaagacttaaatgttagacctaaaaccgtaaaaaccgtagaagaaaacctaggcaataccattcaggacataggcatgggcaaggacttcatgtctaaaacaccaaaagcaatggcaacaaaagccaagattgacaaacgggatctaattaaactaaagagcttctgcacagcaaaagaaactaccatcagagtgaacaggcaacctacagaatgggagaaaatttttgcaatctactcatctgacaaagggctaatatccagaatctacaaagaactcaaacaaatttacaagaaaaaaacaaccccatcaaaaagtgggcgaaggatatgaacagacacttctcaaaagaagacatttatgcagccaacaggcgcataaaaaaatgctcatcatcactggccatcagagaaatgcaaatcaaaaccacaatgagataccatctcacactagttagaatggcgatcattaaaaagtcaggaagcaacaggtgctggagaggatgtggagaaataggaacacttttatactgttggtgggactgtaaaccagttcaaccattgtggaagtcggtgtggcgattcctcaaggatctagacctagaaataccatttgacccagccatcccattactaggcatatacccaaaggattataattcatgctactatagagacacatgcacacaaatgtttattgtggcactattcacaatagcaaagacttggaaccaacccaaatgtccatcagtgatagactggattaagaaaatgtggcatatatacaccatggaatactatgcagccacaaaaagtatgagttcatgtcctttgtaggacatggatgaagctggaaaccatcattctcagcaaactattgcaaggacaaaaaaccaaacactgtatgttctcacttacaggtgggaattgaacaatgagaacacttggacacaggaagaggaacatcacacaccagggcctgtcatggggtggggggaggggggagggatagcattaggagatatacctaatgtaaatgatgagttaatgggtgcagcacaccaacatggcacatgtatacatatgtaacaaacctgcatgttgtgcacatgtaccctagaacttaaagtataaaaaaaaaaaaggaacaggagaatgaactattttttttagaaatggagcctcactcactctgtcactcaggctggagtactgtgacatgatcttagctcactgcagcctccacctcttgggctcttgggctcaagtgattctcctgcctcagcctcccaagtagctaggaccatgcgccaccatgcctggctgattttttgtatttttagtagagacagggtttcaccatgatggccaggctggtctagaatccctgacctcaggtgatctgcccgcctcggcctcccaaaatgctgggattaccggcgtgagccacagcgtctggccctatatgcttttttcaattcaatggctacttgcctaattttgaatggccaaaataaccttccagttattttcccttaatggaatcaacctagaatagttgcctggggagagggagctggggggcagtgattggaaagagacatgagggaactttttggagggataaaattgttctatattttgatttaggtgttagttacaggatattttcatttgtaaaatttatgaactgtagaccttagatctgtgcattttaccatatataaattatatctcaatttaagcatagaaaaagtaaaccaatgattgtgatatacttggctaatgtccatatgctacagtgtgttgaaaagaaaaataataccctattgagaaggtagacatgtactgcaagcataagctatgaaaacagagaaaagccgcagacattgttaacggactgagctgggatgtttccagttgtggggattctgagcctcttttgtaatgtgcttaatcacttctaattgtacagtcagctaattacagtaattagtcttgccttagttcaacagagttgaactaagtcattctcttagcgggactgggttgaattttcctgcatctagcgacttcctcagattgtggcctgcaatggtgcattcccggggctcaagaagtgatctgtttgtgctgggttttcaccactgggtgtttgaggggtgagggatgtgactaatcatggagccagtgagtcacgcgtgtcaggcctctgagcacagcaagagctctttgggctctgcactggcaccactctcggcgtactgacccagccttgcttaggtccaagtcaatcacattgtttttttttttttttgagacagagtctcactctgtcacccaggctggagtgcagtggcatgatcttggctcactgcaagctctgcctcccgggttcatgccattctcctacctcagcctcccaaatagctgggactacaggtgcccaccaccacacccagctaatttttttgtatttttcagtagagactggtttcaccatgttagccaggatggtctcgatctcctgaccttgtgatctgcccgcctcggcctcccgaagtgctgggattacagacgtgagccgccacgcttggccgtcaatcacattttgaaaacagacagggttatttactgcagcaccgtttgtaataccaaaataatagaaacagtctgtaggacaggagactggttaaataaattatggttcattcatataatactgacaaaaagaatgaggatgctctctatgtactgatctggaaagagcttcaaactatattgttacatgaaaaaaaagaactgaatgcatagtaaggccatttgtataaaatataaaagtataggtttgtatttgcttgtttatgtataaagaaactgaaaagagataagaaacaataacagggaagatgtttatgtgggagggcaagggaatttggggcatgaaagttgggaagtgggtgggaaagggatggaattaggcaagacttcactgcaaacctttataaaatagatgtttaaatattcaaatgaatgtgttattacctaatgaaacattgaaatcaattaattaaaatgtacaagagttttttttttttttttttttttttttgagactgagtctcgctctgtcacccaggctggagtgcagtggcatgatcttggctcactacaagctctgcctcccaggttcatgccattctcctgcctcagcctcccgagtagctgggactacaggtgcctgccaccacgcccggctaattttttttttgtatttttagtagagatgggatttcaccgtgttagccaggatggttttgatctcctgaccttgtgatctgcccacctcagcctccccaagtgctgggattacaggcgtgagccaccgcgcctggccaagagtttttaaaaatagaaaaaagttttaggggaagaagaaatccagtgatcacataatctaacatttcccaaatagtggtttttaaaggtataatgagaaatttgtgtatttaaaacaatagtgggcaggcctggtggctcacacctatactttgggaggcagaggcagacagatcaattgagcccaggagtttgagaccagccagggcaacatagtgagactctgtcttgacaaaaaaaattaaaataaaatagtcgagtatggtagtgcttgcctgtagtcccagctattcaggaggctgaggtgggaggatcacttgagcccaggaggttcaggctgtagtgagccatgactgtgctactgcactccgtccagcctgggtgacagtgagaccctgtctcgaaaaataaaataaagcaatagtggaatctgttttgactcctactttcttatatttaatgcataattgtttctttttgagatggagtttcgctctcgttgactaggttggagtgcaatggtgcaatctgggctcactgcaatctccacctcctaagttcaagcgattctccttcctcagcctcccaagtagctgaagtagctaggattacaggcatgcaccaccacgcctggctaaatttgtatttttagtagagacggggtttcatcattttggtcaggctggtcttgaactcctgacctcaggtgatagacctgcctcggcctcccaaagtgctcggattataggcatgagccactgtacccggcccatagaataatttttaagcaattgttttcccattatgacaaaactctgagagttcctggggtgtggagtggacacagtagacagccatggagagcaggtgtccaggctgtgacttggttgattaaggatctttctgcttgaaaacacctcttcttgtgcttgtacagttataatttgtttttattcttttttttttttttgagatggattctcactctgtagcccaggctggagtgcggtggtgtgatctcagctcactgcaacctccgcctcccaggttgaagtgattctcctgcctcagcctctggagtagctgggattacaggtatgcaccactatgcctggctcattttttttttttttttagtagagacagggttttgccatgttggccaggctggtcttgaactcctgacctcaggtattccacccacctcagcctcccaaagtgctgggattacaggcgtgagccactgtgcccggcctgtttttattcttaaccatgtttaattaatgccccaaatggcccaagaatcaaaaagaatcttgctgttgaacacagctaggtaatgtggagcatgaaaattattattctacaaatatgcttcaggactttttctccagatctgaaaactgtgattaatcaacttctcatatagaaaattcagcccttccactttagaatctattgttaatgagaaaatattgcaaccagtgtataaaatgattttccaggtattataaatgaagactacatttgatgtgtcatttataaataaaagatgaaattattaaagttaactagttgattttgggtgtgcaaaatgtgagaatttcatatatgtatattatctgtggagcagtaacatcatgatgactttacaaattaggaaagtcactaaacaaagaacaactataacaaggagcaataactacaaaccctggggagggagtagagtctgatttccagagatgtacattatattatttaaaatgtccagttttcaacaaaaagtatgagacatgcaaagatacaagaaagtatggcccatgcacaggggaaaatgcaatcaataggaacacagataatgtctctgccattagatttattagacaaagactttaagtcagctactttaaatatattcaaagaaataaatgaaaccatgtctaaagaacaaaataaaagtataaaaattttgtctcacaaaatagggaatatcaataaaaacatataaattatttttaagatcatcgaacaggtattctggagttgaaaaatataataactgaaatgaaaaatctagtggggctcaacagcacatttgagcaggctggagaaagaataagcaaaattgaaaatgggtcaattgagattatccagtttgaggaacagaaaaaaaaagaatgaagggaaaaaatgaacagagcctcaaaaatctgtgggttccatcaagcatacaaacatacttataatgggagtcccagaaggagaaggagagaaaaaggacagaaagaatatttgaagaagtagaaaagaacttccaattttgataaaaagtacaaataagcatgtccaagaagcacactgaacttcaaataggataaactcagagattcacacctagacacatgataatcaaactgttgaaagccaaaggcaaagagagggtcttgaaatcagcaaaaaaacaaaaaaaccaactcaccgtgtatcaggattctcaataagattaacatttgatctctggaggccaagaaggctatgatatgacataaaatgctacagaaaaaaaaaaaaacaaacatacctgtcaactaagcattctatatccagcaaaagaatccctcagaaataaaggagaaatcaaggcattcctagataaacaaagtgaggaaattcatcacttagcaaatcttccctgtaagaaataaaaggtgctcttcgggctgaaaggacttgaggcattaagtcaaattcacatgaaatgaagaatactggtaaaggaaattacataggtaaatataaaaggcagcataaatatgcaataattataaacgtgatgggcatataatggataaaaatgtaatctgtaggacagtaacagcacaaaagaggggagaatggagctatataggagcaaagcttttgtatattattgaaattaagttgccattaatccaaactagaatgttataagatgttcattataatccccagggcaacccataagaaagagggaggagtgatcaactgtgtcaaatgtagctgatagtttaagatgagatctgagaatgactatttcattgggcaacagaaaggtcactgatgagcagttttaggggaatggtggggacaggtggcaaacctgactagattgctttaggtagaataggaggaaaggaagtggagataatgaatatggataattattccaggaattttgctgaaaatgagggcaacgagaatggaggtgagcgcaggagatttttcaacgggtttgtttgctcatgggaatgcagcagggaaaaactgattgtctcctctgtcactgttattaagggagaagtttgaagatcagaggaaagttattggaacatcatacttttcaccctaaagtcccaggcacaggaatctttggttattgggaaaatacacacaaacacacatttgtttgagtgggtttatattacataatactgtactcacagatacattttaaaaaaatatcttaactaagatggcagtatatgatcattaactaatactttcaggcacaacaatcagagtgaggtactccatgaatgaaatctatgtttcaaatgttttcttgataattttggattttattcaaaatttgaaaggctgtgttcttatcagctacagttagatctatccttgcccttgccttgtactgaggttaacaagaatagtaatgactgttcttcactgttttattttttattttttaattttttttgagacggactctcgctgtcacccaggctggagtgcagtggcgtgatctcggctcactgcaggctctgccccacggggttcacgcgattctcctgcctcagcctcccaagtagctgggactacaggtgcccgccacctcacccggctaattttttgtatttttagtagagacggggtttcaccgtgttagccagaatggtctcgatctcctgacctcgtgatccgcctgcctcggcctcccaaagtgctgggattacaggcgtgagccaccgcgcccggcctattcactgttttcttcttgttcaccctgcccacattattagtgttatcttcaggctgggtgttctttgcagatacctttttttttttttttttttttttttttgagacggagtctcgctctgtcgcccaggctggagtgcagtggcgcgatctcggctcactgcaagctccgcctcccgggttcacgccattctcctgcctcagcctcccgagtagctgggactacaggcgcccgctaccacgcccggctaattttttgtatttttagtagagacggggtttcaccgtgttagccaggatggtctcgatctcctgacctcgtgatccgcccgcctcggcctcccaaagtgccttgtttttttaaaaaaactttttattatagagaattggaaacatatataggcaataatataatgaaccccccgtagactcatcattcatcttccactattatcaacttgttaccaacaaagctggtcccccataaaatggagtctttccctctttggtgtcccaaagccaatttggaaaaacaaaagcaagtgtcaagcagtgcaggccttgttggatggccagggaattgagaagcaggagcttggttcatgaattaacttctcagcttgtgaaagtcaggaagtcacaaatatagggcctctttaatgaaggggttgggtattaaaagctaggggataatattcatgtcttttttgggaatggacagagaacttctcaaaactagagtattgccttcctttttttttgtccttttatggtttcctttggtcattgtcatggtgattatcaactgtcacggtgctggtgggaatgtcatttagcatggaaagtagattataatgaagttagaagttcttcagaggtcaagtgagctgccttcttggatctcagtgtttggtcatgtggggcaccttctgaccacaggtatcctgtttcctaaaggtaagccagggtagaaattcacctgtcacataggcatgtaatgtaaagaaacccatggcctgttcacttcccccgtcctgtaatattttgaagatgatcccatatataatattattacatctgataatgtgtatctctaaaacataacgactctcttaaaaaatctaactataatcccattatcacacttgaaaaataatttgcagggaaaatctttgcactaaaagccaggtcaagaaagaaagaaatgtgtctttagtataataaagctgaggtcattatttcacagggagtaaggtcaaagtcgtattaatttgaggaagatcctgtctttgcatagactagctggaggtcatttctctagtaaatcagactggcagtccttgaagaaaaactaatgtttgtggtggtgggttatgcttgtcttcaaggtactttaggagagaagctggccttggcattgctggtggagtgggactgagctagcatggaagccaccaattcctgccccatgtttgtgaaactgaagcaccacatccttcccccacttagcagaagcaggagttgatgacaatcacattctcatccagctgaaatctgatgggctagagttcgtaagattcaggaagtaacgaaccaggaactctcttattccatggactgtggtctgggtcagtaggctgggagagcttggaggaaacagggagggaacagcataaccgtgtaagggaacagttactgtaggaggaagcaacggccacccttgaaaggccttgaggcttggtctttttctcctatgtggagaaagggagccagctgacctaatcaaggcaagttgtcaactgtttggggcagttacttgaaactttagccaaaataactccttaattgtcctttaaaatttactttgtatttagtgtggtggagatgggggaggcagaacatggactgcggggagggcatgtgaatgtgcagagaggagcacccaacagccgaccagtgcccagccacagacgccacaaggcacagtctccattctccttggaagaaaggcctcccctacccctaggaagaacggagcctgacacagagcttgtgttcgcccatatcacacacacttagaattctgttcttgggaactcaggcagatctctggggagccgatgggggactgtgaaattaggttcacttctggatttcattataataaagcaggcccctatccccaattttaggcatcaacatagaacagctaactttaaatttttccaagtgataatataaaacaaacgactttcaattaagttaaatgtcaatatttgtgaaccgaaaagtacctgtatcagtttagaaatttatgttgcgaaggtgaaggactcgcgcccagaagacaggtctgtgcctttctccaaagatgattttgagggcttcaatatttaaaggggaaaagcaggctggagggggaagatggaaggtatgttcacattattgaagccacatgttgcgataaagggagcaggtagggcaacagttatgtatttggcgctcagtaaatcggcactttacacaagataaggtgaacatagagtggagatacttcacctttaatctgtagctatctgcttaggaacaaaaggaaaggcagttgcatgactcagctttcagtttaattttttttccttttggcagagtgaattttcgtttcacaataccaaaaaaaaaaaaaaaaaaaaagcggggggaggctcagaataaggaacaatcctttggcttgagtatttcatttcatgaaaaactaaattgttatttcttttttccacaagaacgattaacagagctgcagaccagtgtttggggtcatctgagtggaaattgtcgagccgactttggctcatacgttccttttctcgttaaggagggagtgacggggcaaatctgcgtgctgctggtggcggtgcctcccagggctgctcggcggggacgccgagggctgcacccgagctccatcccgtgttggctgcgcgccctccaaaaccccggctgtcagcgactgcgggcacctgcacgccgacgagaccggcgggcggacagcgactccggtgagggtactatctctctaccctcggggcgcgggtggcagaggcttcctgttttgaggatggcgccacacaaaacaagcatccttagcctgaagggccccggccgaagggccggaagtggaagtgcgcggccttgcccgccgcgtttcccctcctcggagtgctttttgtggaccctgggcaaggggctcttgctacatagagaggagcaaagaacaggcatcgcccggtccttaaagcggcggcaccctccacgccccgcagtcgcgtctgcttggtccacagcctcccctcccaggcccgcgcagaggcccagcaagcaccagtctggaggcaacaagcacgcaggggtgcctttgcggccacgcacactgcatcgcagtgaaaaaggctcccgttctcaaggcgcatgcgcgcaggccagcaactccaaagccaggcctccagccccggtttgctagagagaaaggtagccgggaggtggggaaaaggagaacaggagggccctgtccgctaaggtagcctcccattggctcctcttgctccgctctcggtcgcgattggctacgggccgggagcacgggccgagcacgctcccacgcgcagagcggcattcggcaggcggacggcggtgcagccaatgggagcggcccgcggggcggggcttgtgagctggggctcccccggagcgggcgagttggtaaacagatccggagcgcgtggcgggcgtcagcgcggtggccagcgcgcagaggcgggcgcggaggcggctagaaggtgaccgcggatcccagcttcctgcagccaggtaaggctgccacccgccggcccgccgcgtgcccaggcgccgtctggctgcggccagagctggggtcaacacccacctcagcccttcttgcattctcttcatgtgacagcgcagcttccccgcgagtttcgctggccgcgagcctcaggtccggacgcagtgggggcgcctcagttgcagggtgggtcctctgcagccgtctcacgtccctgggtccacctcagcccctcgttcctgcttcggggaggagacgagggccacgtgcagagccttgggtccctggaacacgcccgctgcttgcccgaccgccttcccgctgccgaatgcccgttgcccatgccctttggtcgccaatacagctttgatgcttcgctttctaataatgttgttcttcactcccagacccccttgcactgtgtgtctggggctctaggctcgttgccgctggctgcaggtttgggtgagaactttgacttccttggctggagccagctgttgggcttcgcaggtgggaattttgtgtgaacttgggacaggggatcctttttgatcctttcttcctttcgcttttctttggcctttcctcttctccaaactctggggggtcttgtgagtggtttgggcttactcccctaaactcgaacctttccgaggctcattctcacccattgcacagaggtaacagcccctctgccaaaccctctttgggcgatggggagtgctgcaggggcaggtttgggtgttgggactccccatttgggtgagagatgtcaggttcctgaagggtgagaggcttgtgtgcagtcttccagcctgagtcgggcctacagcctgttgaaaaacttgtgcacgttcacttgggccttggatctacgtgacaggattgagtagctggtcatgccaggcctacctgattgccaaaggatttgaacattccttgatgccagcctgccagttgtcacgctgtggatgggtaggtcatcctggcaggagggctcttgggagactcttcttttggaggaaggcctttctcccgaggagagacaaaaggggagctacaggagcagcatctgtaagactcaggcggctgggtgcggtggctcacgcctgtaatcccagcactttgggagtccgaggcgggtggatcaccgtaggtcaggagttcgagaccagcctggccaaaatggtgaaaccccgtctctaccgaaaaaaaaaaaatacgaaaattagccggatgtggtggcgggcgcctataatcccagctactcaggaggctgaggtgggagaattgcttgaacctgggaggcagaggttgcagtgagccaagatggcgccagtgcactcccctctgggcaacagagcgagactcaatctcaaaaaaaaaaaaaaaaggctcaggcaatggcttagagtgttttgttcagccttgcaaatggtgcggactatgcagaatcgtaatgatttggggcctaatgttgagcaactcaaaggaaaagtgaaccaggcagaatgggcacctccctcagagccagtgtgttatctaagacaaagtttttcaacctgtggactaatgacattttggacccataattcttcgttgtgggagacctggcctatacattgtaggatgtgtagcagtatccctggcttctgtctactagactagcaccgctccccaccccttctagccgttgtgaccatcaaaagtgtttccagacattgccacgtgtcccctggagggcaaaatctcccttgattgagaaccactgaggtaaaactctaaaaagagttgtcctgtgctgccaggggtccctctgggacctgcccgtgagtaggtgagaggtttaggcaaagggtagtgttatgcctcctgccctaacccagtggtaaaagccatgtagattgggctacctgtgcacctaggagggcagaggcaaaacctgcaagcagaaagttaggaggtagacacccatgggcatgtactgtgcctgctaaatgtgtggcagtgactggctgggttgggggtgctggagaattagaagactggtagcttctcggggatactgcaagactaggggatttgcacatgaataactatgggccagttttaaaataggaaacatgcttaagctgagtgctggcacaaaggctaactcagctatccacaagtggttcttcaaggagatgctttattcatcctcactttttgctcagacagctctgtgtcttgtgatgtgggaggggctgggcctgcatcttcagggagtgagtggctgggtgcatttcaaacatacgtatgtgtatttttacacagcagcgtggacatgggtatgatttgtggagttcttttgtagttgcttgaagcatcagtgtcaaggtcagtgaaccttttctttttcttttctcctttggtcagcctgctcaccaaagagacatatttacgtgtgtgtggagaaagatgctttacttctgagtctaaattttgccttcagtgtaatccagaatttatgccccaaatttctaagtcccaaactgattggcacgcagaaaaactgaaaaacagggatttcttgcacagggcaaggaaaaccatcctaagcctattcagtgagtttctttttcttgctgttttgatcctgtggggatgtatcaggattttcctgtaacactccttggtcagttaggggatcttttgggtgccctttgttgcctgtagaaaaggatcaggaaggaaggtcacttctcctttctcaaagagaattttaaagaaggctattattgggaagctcaaaacttggcaggataattttccagtaagaaccatggacactgagtcattatctttgtccgttgaaacaagagctgtgtgcaaaattagacaggaatatttagacagagagttgtcttgatttgacagtggcatctggagatacttctgtcattcctgttaagcaacagccaggaactcgggagagccagtggaaaggagagctggtgggagtgagtgagttcgagggtcctgctctttctggagttgcacatatggaggggtgggagccccacggaggtggtttgtgagaagtgaggatggcccgagtccccaaggggagatagaactgaaggcatggattcaaagaaatttatgcaggtggaatttctagactgactacctgactggatatatggctgagatttctaatcagggggaggagctggttgatggaggaagagctggtttgggagaaggtggtcatcttagttttagacatgatgggagcctatgggacttctttccatcctgtttgatataatttgcatacggtaaattcatccttcttagtgtgcagttctgcgcagtttgacaaacgcacatagtcacataacccctaccacaatcaagctatagaacaatttcatcaccctccgaaatttccctgcacccctttccagttgcctgtgggtctttgaagtggtgatgcggtatgtgtgtgtgtaacttggtttgttctggaaatgggttcggttgttgagaggtcctgcctggcctgagtgtggggaggcatcagtgcagagcctgtggaggggctctggcaccccaggagccagtgcagatggcagggaggcaggggtgtcgaggaccagcctgggaactcccaggccttggagtaggtggagaaagaggagctgggggaggaagctgaggaggtgaggccagagaggagggaggagggagggcttctgggaagagtgtggggccagcagggaacactgtggggcagggggtggctgaggagacccactggcttgagccctcaggtgtcacagaggggcagcttggggttggggccagaaagtgtgtgccgagggagcagggaagatggcaagtgcactccatccttgggagatggtagccatgtccagagggtggaggagaagcagagcctatgggaggtttatttaaatgtttggtacaggagagcagagagtgggcttgtgggcttcaggggagggcttttatgattgaaggcaaaagaaaaaaataggtcaggggcaaggtcttgttgcgggaaggaggagggatggtcagtgtgggaggagattggacagaggcaggggaagggtctgagagatgtggccaagaatgtgcgggccctcctatctggttgcccccatttctggagtaacaaaggtccgctaaagaggggtcgaggccttctgtttaatgtgagagggccaggggtgggggcttgaagagccttaggtgcctcagcatcctttgaggagttgtaccctgagagagagagagagagagagagagagagagagagagagagagagagagagagagagtgagagagagagagtgagagagagagagtgagagagagagagtgtgtgtgtatgtgtagaagggaggcaggaaggtaggtgtttccgggtcatttggaaaagcccagtcccttatctctccctacctctgcaccgtccactggaattttccatttcccagaggtgtgtttcctgagagacagagaggctgtagcgcccctctctgcctttctgaagacagcagggttggtctgcctcttacctctcactatttcatagaatctctagaaggatcagtatctgcgttgttttgagcattactctttctagaccccgttacatcccagctttcagaacagccctgtgtgtgctctccttgctgactttctgcactccagggatgcatggccctttcctaatctctgggaactagacctcctccaggtcagtcgcctcacttacacatgaggaaatgagaaaacgcaggccccaagaggagaagcggtgtgcctgaggtcacccgcgcttggtggccttgctgttggtcctccccgtcggccctcatcacaatatatgcggtgtcatctgggaactggaggacctggtggcaagtccctgctgttcacggggctggatgaggggtcctggggacagtccacatgaaaagaaatgttaaagttcaagctcagagcctgggccccagcccagtgtttgttctgtgcttggcacattttttgtttggcactgatactggctcagaggagggtaaaagtaagagtcgattgcccggtaagctgaaggtggttactgtttgacacgtgcttgagcaaacatctctaatcttcccgagattgaaaaaatcctgtggctcttgctccctaaggtgtttacagccagcatgtggtcaagggttggacattgtgctgccgcgatgcctgttgtagctgctgtttacacctgcttggtgctcacggttcatgggccagggctgattggcctgctgaggaacagctgcctgctggcttcagcccctcctcttttccctcagtcttagacagggacgggggtgacgcagaggaagcagtagcagtgactgcgtcccctgctccctccctgggtctgtgtgcccaccatgagcgggattatgaagctggcttggaaactcatctggcttttgctcctgtaaaaatcactttttgaacagggtgctgctgccatttctgtggctgtgcatgttggggattcaggttcccctggtgctcagcctcctcggtggtctcttcagtcctgggctctcgatgagggagctcaggaagccacggagcctgggtgcctgggtcctgcctcactgactcataatgctaataaactcgtgtgtatgaggacagtgccagaccccgttgggggtacagaactgggaaagagagggcccctccctccggagcttaccttgcagtaagggaaatgggacaggcacacacagagtcatacagggcatggcgaggtgaccttaggccattaagagatgagggagtttagaggaaaggagatgacttgcctatggaggggtttaccagtccagcagggtggccaagattccagcaggggaaatgatattccatggggaggagggagcaggatgtggaagctggaaaacctgtgtgggtgttgggcggggccgggggtccattctggctgaagcgttggggcacggaggcatctagcgagaggtatcgctgcagaggtgtctggggctccacagtgaagggccttgctggccaggccagaccagggagagtggagatcagcaaggagatggccacctctcctgggtctgtggtccccttgcaccctgctgagcctcttctcatttctcgttgcgtgtgtggttgttgtctgtctaggattgccccttgtctgggttaactgggtgattttaaaagctatcgaggttttacatacacatgtagtgcctaagggttgtgtgtgacctcagggcagaacatgtttatttaacttccataccagtgatgtgtgcatgtccacacctggcctgtgtgtggcatttggaggtgatgctaataaaggttggtgctggtgttgagtgtggcaagactgagggccgtgtgcccgatggctcctcctagctcttgcacacccagaggcagtcttcagtgtagggcgtctgcctctttccactatttatgtttaagatcaaactggctctggaaccaagctttgcctctagtgggtaggatcactggtgctgagaattgtgataccctcagtcctggcagctgacaaactttccagagcagggagtttggccagatggcctttgagagcccagctggccccagaatttttatgactcaattttctgtaaccaggaagacacatttcaggatgtaaaccttgctgatgtctcatattgagtgactattgatttaacaaaaaaggagttattgatttggggcagtgttcttctctgctatctctcagcttcctaggcagtaagaagaaaggactggagcctgagtcagacaggtgtggaagggtccagcatcccacagctttggcccttaggagattgctcagccttgatgagctttaattatcctatcaatgagtggggataatacctcaccaggtctttgtaagaactagaggtaatataaagtgacaggcagacagaggggaataataaatggtagctgttcttgttattattcctatttcattgagatattaaacctgaagtaaaagtgttttgaaagattaagaatataaaaccgaggccaggcacggtgactcacacctataatcccagcactttgggaggccgaggtgggcagatcacttgaggtcgggggttcgagaccagcctgagcaacatggtgaaaccctgtctctactaaaaatacaaacaaattagccaggtgtggtggtacccacctgtagtcctagctactcaggataatcacctgtgcctggggaggttgaggctgcagtgagctgtgatcatgccactgaattccaacctaggcaacagtaagaccctgtctcaaaaaaatatatatatatatatatctatctgcctggcatgtagtatgggcccaatatagagaaagtcaacaggactccgtcattaagaacaggaatgcactgagctgtctgtggggtagtctaccacccagcttggtgcctcgcacttggttggcattcagtagtatttgtggagtgaccaaagttaatttagaagaatggtctggaaattattctagaatacagcccctctccccaacccaaggatctgctttaatttcctatggctgttgtgataaattaccacaaagtttgtggctcaaagcatcataaatgtatgatcttacagttctggaggttagaagtctgaaattggtctcactaggctagaatcaaggtatcagctgggctggttcatttctggaggctcaagggcaggacccgaccccttgccttttccagcctagaggctgcctgcattccttggcttgtggcctcttcctcacaatggcatcactccagcctcacttctgtctcccatcacctcgttctgactctgccctgcctgcctccctcttatatgggcccttgtgattacattgggcccacctggataatcccccatctcaggatccctgacttcatcatatctgcaaagtcccatttgcaggtaacattcacaggttctggggattgtggtatgggtatctttgagacaccattattcagcctaccacagccacccacagtattttggccagatttaaagacaaccctgtaagcgtctgaaagaaacgttgaaagaaacccttcaacctcaactttaggatccttaattaccttcctgggtggcagtggttcgtgaattcagtcaacgcttgcgcttgtaatttgtgtgggtggatcactctgtgtgtgtgggtggagtgggaagagtcagagttgtctgagacaagagcctcccacaaggagcttatagtttgaagagaagagaggtccatgtgcaagaagaagagtaacttacaatgtaggaatctgaccagcaagttagatcagctgtcaggagaacgtaaatatggaagagctgggaatcaagggcctgaataggaatacgttcttgaatttatatggtgctttaacacatttcaaagtatatccacccacccctccatttatattggacaatataataacttataccatcatttcgaggagaggaaacaggtcagagatggttcgagaatatgcctggagcagcccagctggtcagggcagagctgattcccagccccaaggccccaaggccctcacccttggctaatgggtgggttttcagacgtacagagatgaaggggcgagcgggcctgcctgagaaagtaggacctgcagagtggagtgcgctcacatggctcgcgcgtagctggaggctggaaaggaggccgggggcctgatttcgatgcctgggacttcaggcgcaggagtttgggttttatatatatgtctacatacatgtctacaggtagaggagccatttgagcaacgcgttggcatgatgaacgtgggtttttttatagggagaggaatctggcaggagagtgttccatggctcggagctggggagcttgtgggagttagaggggttttcttcccaactgcctctccctgaatgtacctggacaaaagcctcccatgctgttttctcctttaaggtgaagtggtaaggaataccagtggacatttgtgtccctggtttcgaagcaggctgccagcactttggactgcctctcctgaatgatgcctcataccacagcactaaataaaccacactggtcctccccagcccagccttcctcccaactcaggtatgagactgtgcctggcaggaacaactgcgggttatccagactgatcccattcaccctaaccgttggtctcaccaagtctgaacttcattccagaatgtctgtgtgcttgcaatactactactaataataatggcattagctaatggtttttaagcacctactatatgtcctgaatgctgttacatggatttatccagtcctttcaagaacagatgaggaaactgaggcacaaagataagctcacatgacttgatttaggtcacactagcaagtcagtggcagagtcatgatgtgaacccagatcacctaacctcagagcatcttaaccatgtcaccagtatcacttcctgagccaaatattttaatttaaatgttttaagcagtaaacttcactaggtttttagtcagaaaactaaattgccatcaggaccttgcgcttggctggttggcctttaaaagccttgtgtgtcatcggctatatcaactcacagagtgggagaggctgcttgggaccctctgttgcctgcctgtggttggagctctgagcccatgcaggttcgctcacagtgttgggtccttctctggactatcatcagaggctggaactttgccttctgctgcttttatatcacccccaaccctgcccagctcccaacccagtgctcaccacagggcaactcacccagggaatcctaagaatatcttaatcttccaatggatggagaatggaggtttgcagcctgggacatcaaaaacacactgttttgctctttttctcctcttacctgttaaacaggttgcctagctcctgagccatgatggatccaggtcccagctttacttcttaaaagctgtgtgacttcgggcaaattacttaaccactctgtgccttagcaccctcatctgtaaaatgggcataatttaccttttgaaaatgattgagttaatacatctttgtgctaagtagaacactgagcccagagcctggcatatactaaacccagcaaaagcagctgtagttatcattggcatggtgggctggttctgctgctcacaaaatgaaaacatctgtgaaactggtttcattcatgggggagaatgtcagtgcctagttgcttgcttttttttttaagaaaaaattagcagtatgggattcagtgcctgctttcaacaagctcttgtttatgttattagcacaagaatgtataatttttaaacagttcaaagaaaaaccccagtagtctgggagcaactttcaagggaacttgaagtccttagcctagaaggcaagttgagccctggaaactccctttcttacaaggcatgacccactgggacatccagaggctgtgggtacagacctgtgtgagggccatggtgagctcagacctctctgccggggcagacaggccagcgtatgtggctcaccaggaggccaccaacgccctgcagtcagaagggactctatgtggggcatggggtggaggcagcagcgtgcgtccctgtctgcctctgtgtctcccctgaccaccccctgaccccacacccacgtcagtgcttgccttgcaagggggttcttgtaaaggaggctgagaaagtggagggatgaaggaatgattagatggtggatgattttatatcagcccaagcccaagccgtggaccaacaacgtggaggggaatgcgggtgtctgcagttaggctgtgagcctcctgaagcgacaggaggagggaggagagctgtacagaaagttggcattggacaacccctcccagccccccaggcctgtcccttcatgagcagtacttaggggccaccctggcctggataatacagtaccaggtggcttgcctttctctggcttcacctgggggcctgtgggtgttgggcagctctgtgtctggcgaggtgagcccatttctcagggtcaggagcagaactataatgggggggtccttgccccaacacgagccttattggggtgttctcattcaactctggtgaccttccaaatttcctgggacagctgtggtttttactcttgccctagaatatgagtcgacaaatagtaaatattttgggctttatgggtcatagatctttcttgcaactgctgaactttgctgttgtagccaaaaaagaaaaaaaaaagaaagcagctagggacaatacatatgtaaacgaatgagctatacgtaatctataaatgggtgagcaggctgtgttccaataaaactttattgacaaaaaagcaagcagtaggactggatttggcttgaggaccatggtttgctaacccctgccctggaaggacactaattatgtgtcttaatttttgttgcaaaagatgtggtcactgcacctactacccagttctaaactaggatcctgtttttttgaggatcgggggtaagcaccctttcattatttccgtcttttaacccagaggccaacattagggaaggcaggcagacccgctgcttgttccaagtgatttttttccccactgtcccgagaagggcagttgagcctctctctccaaattggaggtgccactttccatccgcctggtggcctgttaggagcagttgtcttctgatgaaggacagtggctaaacaaggagaggcaatgtttatgccattccaatctgctgcctaacccttgcccgttctgctatggacaagcacttaggggatggggaatacatttgtgtgcttgcttactttttaaaattttaataaaagatatttaagattatttttattttatttatcttttattttattttttttgagacaggtcttcttgctctgttacccaggctggagtgcagtcgtgtgatcatagctcactgcagcctcaaatccctgggctcaagcgatcctcccacctcagccttctgagtagctgggactacaggtgcagcaccacgcctggctaatttttttgtttgtagagatggggatgtccctgtgtttcccgggttggtcttaaactcctggcttcaagcaatcttcccaccttggccttccaaagtgctgggattacaggcgtgtgccgcttcacccaacctgatattatttttataacatttattttctattgtaaaagtagttcatgttctttgtagaatattttagaaaatatagatacaggtacaaaggctgtatctatatacaaatctttctataaagaaagatttgtcttcccaccactgcatgaaaagcaacgttcctgtttttgcttcctgtcacctccctccctttcttctctcctttcctgctccaaaaggaaagatgatagttttgtgacctgctttttatttcccgggaatatataataatacactttcttatttgtcagtaaacacctttcacagtgttattttattttatttatttattttttgagatggagtctggctctgtctcccaggctggagtgcagtggcatgatcttggctcactgcagcttccgcctcctggtttcaagccatcctcctgcttcagcctcccgagtagctgggattacaggcgcatgccaccacgcttggataactttcgtatttttagtagagatggggtttcaccatgttggttaggctggtcttgaactcctgacttcgtgatccaccagccttggcctcccaaggtgctgggattacaggcatgagccactgtgcctggcccacagtgtcattttcaatgactatgtggaatgccctcctatgactattccaccgtttagctaactaatcttaggcaaggttgtgatgtttacattcttgtagtgaatgttcacatctgtttttagggagatgtaatttgacaggttttgccaggcagggcctgaggagaaggggagaggggacttcctggaagatgtgctctttggggccagctctgagagcccagccctggggtagactcttgagtacaggctcctgggctcccgctgtgaaggtctcactcagcaggcctgtgctggggctcactgacgggggaaggacggaggcttttttccctctttctcatctcctgggttcttcatgtgttcagttgtctttgaaaactggtagcaggtgaggatatttcaggacctactgacagagaccctgaagctggacctcgcgagatagaagccgggagttgcccgagatgtttgagtgatgctccctggtgtgtgatcataaagactgaggtgaaggttacatctaaagagactcatggagtttggttcagaagtttgaagtctttgccccaacacatacattcttgtgagtccttggaggaaacagtcaattgttttctttttctaagagtaaaaaaggaaaaatttcaaggacgtaaaggaatgtttcagtgcccacacaggctagaaattgagaatgttcatgcccaaagtgaaaagacagttcctggctgggaggggggcagaaggccactgccagcccctcagggtatcctgaatatcattaaacagtccttgccaaagcatccttgaattgacagtcttgagagcctttggaggtctgctctgtgggtcacggtctctaagctcattcacttttgatttcctttttctgtttcttgaagaataatggaaaaagaaggggcaggtggaagacttccgcctaagggcaaagccagactcttgggaagagggtttcagggggagactcttaggaaagggtctctgtggaggcatcctgcctggccataggcatgggccacctctgctccccttccctctcttcctccagaaccggggttctcaaagtaagttcctgggacctgcagtgtcagcagcacctgggaacttgttagagatgcagattcccgggccccaccccagacctgctgagacggaacccttaggggtgtggcccagcactctggactcgtcttaaggtgattgagacgttcgcagcagcttgaggaccagtgcctcagaccagcctcctgagaggcccttgattctgtatgtggagtaaaagttgccagcaagtgtgagccagccagagaatagcaggctttctcaaactttggagggaccagctgagttcatttcctttggcaaatattaatgacctgtctgctcaatcctgagcatggtgttcggtgctggagagaggaagacagatgtggtccttgtcctatggctgatggtccttgtagtccttgtcctgtggctgatatccgactggggagagagttaggcagattcaggaagtggtcactgctgtgctggaggggatgggcacagggtgctgggaggcatgttggggaagccttcccagaagaggtgatgttggtgctgagatccgggaggaggagaggaggtgtgccccctctgcacaggcctgcaggaggaagcctctctggttccaggagtgggttggcctggctggaacctaaaggcagtggagggaagggcagagccatggtgaacggttgctgcatcacccagtgggaatatcagatgcttgagggcaagggaggaggcttgaaagaagcgtatggtggccacattcctcagggtgggagccctgggaggatgaggtgtgggtggtaaggtcagtttgggacgtacttcctataggaggtacctataggtggttggggtgctaggcttgcagcagacagctgccctggggaaggcttctcagcgtggactctccctgactcccactctccctggctcccgcttttcctggttcactctccctggctcccactctccctggctcccactctccctggctgccactctccctggctgccactctccctggttcacactctccttggctgccactctccctggctcctactctccctggctgccactctctctggctgccactccctggttcacactctccctggctcccactctccctggttcacactctccctggctcccactccctgggttcacactctccctggctgtcactccctggttcacactctccctggctcccattctccctggctcccactctccctggttcccattctccctggttcccgctctccctggctcccactctccctggctcccactccctggttcacactctccctggctcccactctccctggttcacactctccctggctcccactccctggttcacactctccctggctcccactctccctggttcacactctccctggctcccactccctggttcacactctccctggctctcactctccctggttcacactctccctggctgccactctccctggctgccactccctggttcacactctccctggttcccattctccctggttcccgctctccctgattcacactctccctggctgccactccctggttcacactctccctggctcccactctccctggttcacactctccctggctctcactctccctggctcccactctccctggttcccactctccctggttcacactctccctggctctcactctccctggttcacactctccctggttcccattctccctggttcacactctccctggttcccgctctccctgattcacactctccctggctgccactctccctggctgccactccctggttcacactctccctggctcccactctccctggttcacactctccctggcttccactctccctggttcacactctccctggctctcactctccctggttcacactctccctggctcccactctccctggttcccactctccgtggttcacactctccctggttcccattctccctggttcccgctctccctgattcacactctccctggctgccactctccctggctgccactccctggttcacactctccctggctcccactctccctggttcacactctccctggctcccactccctggttcacactctccctggctcccactctccctggttcacactctccctggctcccactccctggttcacactctccctggctctcactctccctggttcacactctccctggctgccactctccctggctgccactccctggttcacactctccctggctcccactctccctggttcacactctccctggctgccactccctggttcacactctccctggctgccactccctggttcacactctccctggctcccactctccctcgttcacactctccctggctgccactccctggttcacactctccctggctctcactctccctggttcacactctccctggctcccactctccctggttcacactctccctggctcccactccctggttcacactctccctggctctcactctccctggttcacactctccctggctgccactctccctggctgccactccctggttcacactctccctggctgccactccctcgttcacactctccctggctcccactctccctgattcacactctccctggctgccactccctggttcacactctccctggctctcactctccctggttcacactttccctggctcctgctctccctggcttccgctctccctggcttctgctctccctgactcccgctctccctggctcctactctccctggttcacactctccctagttcacactctccctggctcctactctcccagattcacactctccctgcccccccccccccacctccctggttcacactttgcccagaagaaaggctttttgtgccacttgcttctagcttcttataccagtcatgtctaggctttggtggcagatatgactgcaagagacttcaggacagtgggtccttggcttttagaacagacaccatgctttgctggggaggagctggtttataatgctgtgctctgtatttacggaggagattgaacagtggcttggtaatgcagatgacgtccctggcctgctgtcatagaggagatgagtgacagacagtgagttttggctgtgaaggggggacttggagtgtataagggatcctcagagtaaaattccttccttctggtgggtcctgagtggacagtgtgtgataatctcatctgccgtctgtcaggattgactgttgaattcatttttaaaaaggacacaactcattttcctattgatatatcttcttgtatctggccggttagacagcccgtgggggtgtcttttggttttggagactagatttgaaggtccccatgacccaaataatttccagctcgtgtgcaggtcaggatccccgagtcggagccttgtctccagcatgagtgagacggtgtccctgaaaggtcagagagtgaaagtttggccagaaaacaccctcctgtggtgggaacacagccttgtgcagctttcctaacccctgtccgtggggttgggaagctgcatttatcacggttctttttctctctagacacttcaataaagacatttatttactttaatcgtgatcccaactccatcgtgctcaactagtcaccgaaccagcatcaactccattaatagtcctaataataaagcccctcagatgtcaatatttgatcctcatgtttcaggatactcctcagtagccatcgccatagtatagccaaaaataaccgtcatgccacccaaataaataaaaaagactatcaaccccacaaaagcccgttagagcaggttagcacattaggaccagaaaaggggtctgatgaggcacccagagcccttccgtactgagctactgaggaggggggaagaggttgagccacacgctgggcagcggcagctggtgggtatgggcctggagtctcacgtcccggctccaggtcgtcgcttccactctgcctccgatcctggcgtgtcagcatcagttggcccctagctgtctccctggtgtctgtgcccattatagaggtacgggcatgccacgctgccatgagccctgggccagggcaggttcatcggggcctgcaggaactagcccagagccctgggagaggtcagtgaacttgtgttgaaggaacctccggttgactttttattttggtttcatgcctggctagtggacactcccaaacatgagcacctgtctcccacccccactgctttatcatttatggtcactcttttggctgcccctcctcagaggagagcaggcaggcacacggaggccttcaggaggctgctgtaccaaggaggcacagagcccaaacacttcatttcagttactcacaggcgagacccccaaaacgtgctcatggagcagcaggaagaagtagggtaggtgggagactggtgttcctagcgagggcctggtacttgcagatgaagtcacggtgctgataggatttttaacttgtgtattacatggtttgagggcttttatttctttaaaatcatgatgaaaatacctcctggtgtagctgtgtgcctggttcttggtacacccctggaagggatttgcagcgaaattgtgggatcgttgaattatgaggcactttgggattgtggtgcattagaagtaggattttaagacctaagttttgaaaacagaaggtgagaaaagttctggacagatgtttccttctggtagttattccccttccctcctttctacttctgtgagagcgtagactcccttgcagaaaaatacctggtcttaagctggcatggtggtgcaggcctgtaattccagctgcttgagagcctgaggtgggaggatcagttgagccttggaatttgaggctgtagggtgccatgattatgcctgtgaacagccttgacactccagcccgggcaacatagtgagacccctctcttaaaaaaaaaaaaagtacctgatgttgatgaggtgtgaagggttcactttgcatggtaaggggaggtgtgggtgtggcccctaaacagtaggtcagcgatatttgtcaaaggggggtgggtacaggctgtggttttgaaatgagtctacatgttagtctgctcacaaatgacagactgtgtttattagcagcatctgtttattagcagtctgtgtttattgatttgagaagaacaggttttgcatcccagtatgcaggaccacatatctatggggtatttcccctattgggccctccttccagcggagtgggtgctcaccatctctgcttcctggctctggcgccactgtctagggtggggcttggcaccagttgggagttcactgggtatgtaggatgcaactgtttaggtaggaagaaagacacaaccaagtactgttcagtgtgtacttttttagatggcttatatatttgccactttgaaagtaggacaagtgaactaagaaagctacccacagtgctccttgatgcttcctttttgattctgcatcatgtggtagtgcttggtggtgttggtgcttggtggtggtgttggtgcttggtggtggtggtggtagtggtacttggtggtggtggtacttggtggtagtggtggtacttggtggtggtggtggtgatggtacttggtggtggtggtggtagtggtacttggtggtggtggtacttggtggtagtggtggtacttggtggtggtggtggtgatggtacttgtggtggtggtacttggtggtggtggtggtggtgatggtacttggtggtggtggtccttggtggtggtggtggtggtacttggtggcggtggtacttggtggtggtacttggtggtggtggcggtacttggtggtggtatcagtggtacttggtggtggtggtggtggtgcttggtggtggtggtggtacttggtggtgtcagtggtggtacttggtggtggcggtggtacttggtggtggtacttggtggtacttggtggtggtggcagtacttggtggtggtggcagtggtacttggtggtggtggtggtgcttggtggtggtggtggtgcttggtggtggtggttgtacttggtggtggtgtcaatggtacttggtggtggtggtggtgcttggtggtggtggtggcggcagtggcggtggtgatggtggtggtggtggtggtggtggtagtggtgcttggtggtggtggtggttgttcatttcttttgaatggtggttaggatcttccaaattattgcactgtgggtctggactgcagtttgaaaacattggtttggtgaatagttgaagctgagggtgggctgaccctgaggggtcagggaggggctctggttgtcccttggtctatggatatccgtcacaggcctcactgggcagagcaatggtggctgggcagggacaggcagcctcagcccctgtgggtttgggttggagcaccaatgccgtgagtggtcccttggaccttgcagggaagttctttgggaattggatgctcctctcccaacaggcagttttggtccagagggatgaaccctagactgggagtctgtgcgcctgactcaagtcctggttctgctgcgaatcatgaatcacgccacctgtctgtgcctcaggttttccgtagggtgcttgtgaggcccaggtgaggaaatgtgtgggaagcagcaagcacaccgcaccactgactcaacggcctttattctgctccattcccctggagtgtccagagtcacgtggagcctcccttgagccctgggccctttcttatctcttagcagaaggggagatcagtggaaaaaccagccctctggaccttctgctcagagtttggtgtggagttggtagtgtgggtttggcctgcagaggcctggggcctcccctgacttggcctcctctcttccagccctgaaggatggctgccatattgggagacaccatcatggtggctaaaggccttgtcaagctgacccaggcggccgtggaaacccacctgcagcacttgggcatcggaggggagctgatcatggcggccagggccctgcagtccacggctgtggagcagattggcatgttcttggggaaggtgcaggtaagggggcctggcagtgggaggggtgctggcaggaagagggtgggacctggagctctgggggagaccaagggctgtgaccatggcaactggtctttggtggccagggcctgagggcccaccagctaatgtgtcccacggtccttccagggtgggacagggcccctgtgtgaggctgtggcaactataacagaattccatagactggtggcttaaacaatgcacgcttatttctcaaagttctaaagactggaaagtccaatattaaggtgccagaagattcagtgtctggtgagggcctgtttcctaatccatagatggccatcttctcactgtgtcctcatggggcaggaggagggcaaggctgctctctagggcctgtgttatgagggcaccaatcccattgaggagggcttcattctcatgacttaattacttcccaaaggccccacctcccaatactatcacactaggggctaggtttcagtgtgtgcactttggagacacacaatgcagtttttactggggcccatgtgtccatcagcctggctcagccttcgaaggcccttcccactgagcctgctgagcctccgccaaggcctggcctcatttttctccttcagtttgctgagggtctctgcactcctgactgggggccctcctttccttggtggcagctggcacagcccttccaagaacagcttcatctccagcctctctctcatccctgtgccatctaggggaggagatgaccttttgtgccaaggtccaggaagccttgatgtcttacctccaaggggtgattttcagtgaaatcgtgtgctggagaggtgactatagacagggctggctacagcagagcacggcccaccatggcgtcaccttgcacagttgccagcagcttccctgacagtcaaggagacagggtggggggtgtttgtgtgcctgttgcgcgtgtgcacctgtgtgtgtgcgcttaggcatgtgtgcattggaggttgtgtcgcagcttctctccttccacgtctgttctgtggatggctgatttctggacaaaggtcaccgccctcctgcaggctgtgaggccgtcgcagcccccaggcatctcagtctcaggtttaggacctgcaggcccttccctgccgctctgggaggatcccacagtgatacagtggctgtcaccaagcatacctgcctttaatgttcagaagtcctcacacctgtgctctcccccgagcctcaccactgtcctgggatgggggccagcctggaccatcacacccatttctcagatgaggaaactgaggtgaagcaatttgctgcaggactcataacgagtgacaggaccagaattcttgtcccctcccagcctggactccatgctcttgccctccccttgcctgatttggtgcctgagtgtggggcctcggcctcgctcttgggtgttttgcctgtgggacactcagaaagtgaggttgcccagctcacttgggcctgcccaggagtgggacagcctggacaggccttagccctaatggcgagcagggcctcctactcgggcactctccaaccctctgctcccaaagcatgtctggaaggggcagggcttccccatcagtcactcggaggtagggctgagtgacgagccacaccacccaggaggcacgggagcagggtaggcaccggagcagggtggctgcccgcagtgcgctgccattcactccctcagtgcttcgcttttccgtgtctcccttctcgcgaggggaggaaggtcacggactccaggatcctgtctccctccagcccctcaaggttgcttccacattcattcagcagatacttactgagtccgggtcccttcggggccctggggacccccccactggccttgggcttccacagtgacaccgacaggtgttagtagcacagggccaggggaccatcatgggagtgatggggcagaaggagggccctgcccaggctccctcactgtcaagccttccctgggggctctgtgaatttaaatatgacttctgtggttttttattttttatttttttgagatggagtcttgctccattgctcaggctagagtgcagtggcgcaatctctgctcactgcaacctccgcctcccaggttcaagcgattctcctgcctcagcctcctgagtagctgggattacaggtgcctgccaccacgcctggctaatttttgtatttttagtagagatggggtttcgccatgttggccaggctggtctcgaactcctgacctcaggtgatctgcctgcttcatcctcccaaagtgctgggattacaggtgtgagccatcgcactggcataaatacaacttgtttctactctgagagtagtgccacagccagcagggccagcctgggtgttggatcccggctctgtcatttgctgcctggtgaccttcaccagcacatcagccgtctttgcctcagtttcctgtttttgaaatgagtgtaacagcctgtctctctcctccctcccatcctgtgacatcttagacagcagaacgtgaggcttgggtatcctgctgtctgcataccctgcgcatttcatttgtttcagttgaagccgagaatccaggccactggtctccctctagaagccggtgctgttctaattataggctcctgggtgctgtttcctggccctgtctgtggcctccagtaactgtgactgtgaggagccctattttcagatgaggaagtagcagagaagggtcaggagctcactcaaggtcactcctggttcagaagcagaaaggacctgggcccgaagctcaggccttggtgaccatcacaaagaaaacatggcgtatcctctcccctgcccctccatttccctgtaccctgagctcttagggacggccaggcctggtcctggttgtaaccacctctccagtgaggatctcttacatgcataccccggctggtgggtggcatccatgtctgcagtaagctgtgggcttaggtgggcccgtcggtgtgcttccctcaccccttgctggccttaggctgtgtgttcacctctcagagctttccctgtcttttgcgccctggtttaccatctccaaagccctggaggccttcttggccctgttttataggtgaggaacccgctgcgggcgtagtgtgcacttggcctggccccggctgggcacacagtaggtgctcagtgtcccacctaggaccacacagcagagccccaacagaagcagggctggagcccaggtcccggctcccaggctgggaagggtgccgggcctcaggtgcagcactgtgccacctctggaggtgggagggggcgggatgctggtggtgtgctgtcctgggcagcaggggacaggcagggaggagctcctggctcgctcttgctctcctaatgctggcctttgctccctgcagggtcaggataaacatgaagaatattttgctgagaacttcggcggcccagaaggggagttccacttctcagtcccgcatgcagccggagcctccacagacttctcttcagcctccgctcccgaccagtcagcgcccccatccctgggtcatgcccacagcgagggcccagctcctgcctacgtggccagtggaccctttagagaagccgggttccccggccaggcctcctcccctctgggcagggccaacgggaggctctttgcaaaccccagagactcattctctgccatgggctttcagcgaaggttcttccaccaggaccaatcccctgttgggggcctcacagccgaggacattgagaaggcccggcaggctaaggctcgccccgagaacaagcagcacaaacagacggtgcgtatgggaggcccctggagggccgaggtagctgccacccacagcagtgatggccttgggctctgctctagggacttttcctgggtgctgtggtctggggtttttaggagcgtggtggccttctcttggtggagtgtgctgtcaggcggagctgctgactgtggggtggagaggagatgtgggggcaacaggagcctctgaaggttggtcctgtccccttggctgattccacaggtctctttctcgtctccctccagctcagcgagcatgcccgggagcggaaggtgcctgtgacgaggattggccggctggccaacttcggaggtaaggtggctgtgtgcccctggactgcctcacctgccctgcctgggcaccacgctgcggcctgcatggaggtggggacccagcaatatcccggggagggcgttgggggagcaggtggcggtggccgcccctgcatgagcttttggggagctggagtttttcatgggaggatgattcagttactggattccagctctgcctggctctcccctgcgggttggtacagggccgatgctgtgccaggagctgagtttggattgcccggcaggcctcgcctggaggcggtgtctgcagcatctctgtttcacccctgcctcaggttcactaccagtcggctgctttggaggcctctcaggaaggaggctgggcagtgaggaaaagctcttccctggggctgttcagcaactcagcagggctttctttccccctgggaccagacatttagggagcccatttgctgggtccccacaggcctgcggctcatgagtggagtgacaagatgccatggcctccagctgctgctgtttaaagccgtttgtctgtactttggggggttgagttgtcattgtgcccagtacacatgcgctctttttatagaagttgaagggtgattttatagtgaaggtttatagcagttgtgtctgctttgatggcatcatgtttgtcatgctgctgctaatgcgctggcccagatgttcctgttaaagtgccatctcctttgctgtggtacactctaagttagttactgggattgcatttctttaacactcagctgtcctcagtaggttctccaggtgatataattaatggaagccacagttttggtggcttgatttggaccctgaccttgggtgagtggttagttccagggctgtaggcagcagaggtctgagtggtccatgatggtgctggtgctgggtggggcatggagatgcactctcatgggtctgcctgtctctttgctggtttatgtttttcctcccatacaccatccatcatacatgctgttcctccgctcctgcctattctcttttggaaaccccatcctacttgttcaagactggttctgggcagaggctcacgtactgtgctccccgagagcctggtattctgggagctgcgtaatgtgtgtgggttctgacattgaatgatggctggcccccctctccaaggtgctgagcagacttggttaactggatagaattttctcagcagtaaggttttctttcataatttttaccttaatatttggcatccactgtacttagccattcaggaatttagtatgaagtgtcatctatgtgacagccaagagtatttgcttatttccttttcctggggtaacatttcaagcagtccctcatagaatatcacacctccctgagttctgctgtcagaatgagtttgagaatcactgccttggtggcctctagtggtccttatcccctggaagacttggcatgttacttgctttgcacattggcttgtcattgggtaacatgtattatttcttattaaaatattgaatggaggctgtcttctttccccatgatattgagggcaggagctaccctgttttcacatcggtaccttttctctgtcccctccctcttcctttcactctagactcttggtgagcctgtccctggaaggctgagtttgacgtgtttcaggactggtgcagtcctcacttcggagtctttgtggggtggggagaagcggtagagctaatgcaggctgttagggaaaagtggtcagaatgaaagtcttgatggtgaattagaatctggtggagcaccacgaagtcctggcgaaggaggcagtagtcagacccttttgggtgacgggttaaggaagacagagactgatgtggaaggggttatatataggaagatgtgtaggaagaaaaaggtagagagctctcctcagagggtgggggattatgggtagccagagggagcctgggttagtggagttgaagccctagtcttgggtgctttgtagcatcagaagcctctggagcctttgctgacacctgcctgatgtacggagccatctgtgggtgtctgtgtgctggaggattgcccacagctatgattcagagatgctcatgttgttgcccaagcaattgacagatgatgtttcaggcttggagatggcaggatgggagcaaagagaagccaggtcaggaaagaacgtgccgttctggccctagtggggaattctgggccttctggctcacccagttgaacctttcaaactgtaggttatgaccctttagtaactgtgaaattaatttaatgcatcaggatcagcatataaaaaacaagttaactgtaatctcagcactttgggaggccgaggtgggagaatcacctgaggtcaggagtttgagaccagcctggccaacatggtgaaaccccaattcctactaaaaaaatacaaaaattagctaggtgtggtggcatgtgactgtaatcccagctactcgggaggctgaggcacaagaattgcttgagcccaggagggagaggttgcagtgagctgagattgcgccactgcactccagtgggggcgacagagtgagactctgtctcaaaaaacaagttaaacagaatggaattcaatagaaaagattagaattaatatcgtacatccttacaatgaactatacacatggcaagatattttagtttcagagacatacatactatttaagtatgttcttcactacaatgtgaaatatatagcttactggtgggtcatcatccaaacagtttgtagttgcactgttgcgctttgttctcctagaaaatacctctagcctttcttcccttcatggaggaaaggtgtttttcaggtgcagactgacagactttaggaagtttttacacggggttatgaaggaaagggattgctctaggtctcagggaggtagggctgctgcagggacccagacgggttttcagcgaggttggcagtaggtattcagctatatagaagtggaagtcaaggactttccaattccaggggctcattttgatgctgaaatgggggcggggcatgagtcctaagtccaatttggctatgggacattatgactgtgatgctatgggcaggatgatctgtggatattagattttcttaaagagtggtgtgaaagaaagggtcatatattggatatggggtcagaactgaactttagttcatcataatagctgtcctttgattacaactgtgcttccagtgtgaccttgggctctaccgtggttttctcttttgtaaaataagggtcttgccgttgattccaaatgggaatattttggtaaatgttccatgtttacctgaaaataattcatgttgagtgcagtgatccgtctatctagtctggtttattattcatattgatcagatttttaagtgattttggtttgcttattcaataagctatcgagagaggcattaaaaagtctgctatgattgtggatttacctacttttagtctattgacttgtgctttatatggtttgaagctatgttatttgttgcctacagattcagaattctttttttttgtttgagacagagtcttgctctgtcgcccaggctggagtgcagtggcacaatcttggctcactgcaacttctgcctcctgggttcaagtgattctcctgcctcagcctcccgagtagctgagactacacgtgcgtgataagtctcgatctcctgacctcatgatccgcccgcctcggcctcctaaagtgctaggattacaggcgtgagccaccgcgcccggccagatttagaattcttcttatatcctcctagggattgacccttcattcttatgttatgcctcttttcatctctgtgaaagtcctcattgtctgatattactatagctacattccagctttgttttgggtaatgtttgcatgttaccttttttttttcccctgtactttcaacttttaaaatgtccttatgtttaatgcatatctatgagcagcatatatagttggttttttgtgtgttttaagtgtagactgataatcttacaatgagaatatttagtccatttacatttaaatgcaattgtggatgtattggagtttatatctactaccttagtttttgtttgtttactatttgacctgtctgttatgtccccctttttctcacctgttttgccttcttttaaattaatcaaggacttaaaattatagtcatgcgtctctctttttttttggagacagtctcgctcggtcacccaggctggagtgcagcggcgtgatctcggctcacagcaacctcaggcaattcccatgcctcagccactcgaatagctggaattacaggtgtgtgctgccatgcccggctaatttttgtagttttagcggagacagggttttgccatgttggccaggctgttcttgaactcctggcctcaagtgatccacctgcctcaaccttccaaagtgctgggattaaaggcatgagccaccgcacctggccctcatgtgtgtcttaacaaggattcagtccgagaaatgtgtcgttaggcagtttcatcattgtgtgaacatcatagagtgtacttacacaaacctagatggtatagcctgctacatgcctaggctgtatggcatagcctgttgctcctaggctacaaacctttacaacatgttactgtactgaatacagtagataactgtaatacaacggtatttgtgtacctaaacatagaaaaggtatagtaaaaatatgatacaatctatcactgtcgtatatgcagtccgttgactgaaatgttacatgatgcgtgaccgtgcatgttctctctttgttagctcttatgttttacattcctttacggttcttttggtgatcactcttgagattacagcacgcatcttgacttattacaatataaaaataagtgattatttttactacttctccaatgatgctaataccttagaacactttttagatattaagatatattaaacaccacaagaattatttctttgtacagcccatatgaatttagatttacccacatatttgcccttttttgtgtttctttcttcctgcatttctataattttatttggtataattttctttttctctgaggaactctcctctctcttacagtgtagtctgttaatcatgaattcttttagtttttatttattttttattgatttattttttgagatgaagttttgctcttgtcacccaggctggagtgcaatggcgtgatctcgactcactgcaacctctgcctcccgggttcaggtgattctcctgcctcagcctcctgagtagctgggattacaggtgcatgccaccacacccagctaatttttgtatttttagcagagatggggttttgccatgttggccaggctgatctcgaactcctgacctcaggtgatccacccacctctgcctcccaaagtgctgggattacaggcatgagccaccacacccgacctagtttttatttttttgaaaatgtcattatagctgggcacggtggctcatgcctgtaatcccagcactttgggaggtcagggtgggtggatcatgaggtcaagagatcgagacgatcctggctaacacggtgaaaccccatctctactaaaagtacaaaaagttagctgggcgtggtggtgggtacctgtaatcccagctacttgggaggctgaggcaggagaatcacttgaactggggaggtggaggttgcagtgagccaagatggcggcgttgcactccagcctggatgacagctccatctcaaaaagaaaaagaaaaaaaagaaaaaagagaatatatcatcatactttatttttttaaggtatttttgctgggtagaatattcgatgttgaaaatgtgtttcctttgatcactttaataatattcctctattgttttcttactttgattgtttttttgaaaatgtggctatcagttatattgctgcttctttgaaagttatgtcttatttcttttctctggctgcttttacgatttcctttttgtttttgttctctagcagtttgactgtgacatgcttgagtgtggtttgctttgtatttattctgcttggggtttacagagcatcttgaactgtggcttccatcagttttggaaaattttgatcatttcttcaaatactgtatctgtactattctctcctctctttctgggactccaattacacatatgttagatcttttccctctgtcccctgtgtctcctttgctcttttctgtattttccatgcctttttccatttatccttcagtcttgcaggtttagaggagatgacttatctcctctgtacctatacattgagaaatggacacctacagaagtgagactttaatggatagaggaggcactagagaagacttgccagaaggagttgagcactgctttgtgcatagctctgtggtggttcctggggccttcacacaggaacttacaatccacatcattaaggcagaaggggagagaggaaaaggggagagaggaagacaggaaacaaaaagtaaagaaagaggaagcaataatattatttgattctgtgtagaaaggattttgaaatttgacctgtgaaaacaaggagatgctcatatgagaaaaagcaggtcagtgggccaggaatgaagagtagagggaatggacctttgggtatcctattatttttaaaaggtaaaaggttgggggtcccttactcccagaaaaatactttgcttttaaatatagcttatgagactctattgggtttcctaagaggtaaggtaactctcttatgttagaaaacaggcattgcttaggctgttggctcttgttgcttaatttcccaaagatgccagtacacttcggatactgttaatacaccagcagcaaagctctctctgggaccattgtgccccatccccccaaacttttgtgtccctcatctcagtggtaaaatttaaaacaaacattgggtgaatgggcttggggtggttatttttaaaattttgcatgtaaggacatttaaaacaaagcaccactttataccatcactttatttatcttttcaaaaggacattttaacagtgcaaaagtataaagtacgtgctttaagacagaggagaataaatggaataacttagttttgtgaaagactcacagtatcacttggtttctggacacggttcgagacctggctgtggcttgctgtggccttgagagccatcccacagcagcaatgctgttggaccctttggctgggaccttcaggaccccctgcaacagcactgtgtgccctaacctgctggcatgatgcccctttgttgacagggctgcatacaaggccagcgacaagtggcaggcagtgacgccagcctgatttgctgagggcacacgccatgcttcctgcagtgccagtgctcttctgggtccactttgcagcaggatagatgtgttctagatccaagagttctgcaccctcagcaggggtgcgggagtgtagttttttgccttctcaggagcctccttggaaaggggcttttctgtgtatttcaggagctctgtgttggagatgagagaggttcttattctctcctgttacagatgaggaagctgagccaagaagaagcatatggcccagggccatatggttatttgtgacatccctgggactagagcccaggcctctgtggtgtgtgtggaagtctgagcctggccaggctctgtaattaggccccagaggggctatagggcttcccttcccccaccagtccagttctgggaacagagggacagatcctgagaacctgtgagagcagccgctaggaactcctctcgccttcccgtgccccttcctgccatgctgggggctgcagccccctccccaggccccctgtcctcccctgaggctgggggcagctggaggatgccaggtggtgatagagaaagactgaacactggggattcaggaacaccttgaagcaaagggaagcctcctgggctgctgcattttctgtggggatttcttgtctattagatgaggattgttggatgcctcagtaaaagctgggcttagcgcagcgcctggtttatagtttgctgctgtttagctgtatctttaccccttgctggtagagaaactcccccgagcccttctctgtaaacaggcctagtttctggcaggtaaagccaaagccccaaggaactttacttactcacccctgcccttaagcacttttcacccagcctgctaggaagggccctgtttgttggaagttgtttgatgttttgctttttttaacctcctggtgtccatctgggcagaagccgagtgactgcccacaggagggccctgtttggctctgatgacctcctagagggacttttgggaggatggggccttgtgggggactgggctccagaagtcataggaggttggcctgcagcctgtgttcctgcctgggggagagcctgcccctccctcccctgtcattccttcattgcataacttctctcggagaaacatgtcagaagctttcctggaacaggccaggagggaagcaaggctgctcacagtggctttagagcctggagcttgtgctggggctggttttcctccaggacgaccttgctggccacgtgggccaagccgggggcgctcttagaatgtggatctgagcagggagaggtgtgaggtgtcctgagggctgtgggggtgccgagtggggtcccacgaggacccggggagtgccggctgaggtgctcatcttctggagttgcctccagtgctggctggttctaatggagggcagaggctggcctgggttcctgagcaatgcgctgagtctggggcgggagggcctcagtttattctgggttcactggtgcaggagctcgtgaggccaaggtcagggttgctggccagctgggctggtttctgtcccctggggagcctgcctgtctgtcagtgggcagcgccttggcctggcactgggctggtcggtcctgagggacgtgtggggcctgaggcctcctctgtggaatgttcttttggtcatttgtttaataacaggtccttgccagtggagagctgtgtgcctgaaagtggccagagaacagtttgaggggggtcctgatggagggtgatgagggggacacacctctgcctgcagaaggaggagctcaatgtggcccaccctacagctgtggcatctccggtaacctgtggatccacctgcccctctcgtgggcttgtctctggacttgcttcaggcagagaagaatccagacacagagagacattggtgaaggtcactgcagtgcacaggctaatgttgcctgtctccgtttatttcgctaagtcagatcgtgtgctcgagtgctggcagggcagaggtgggcaggcatcagggagttaatgtttaaacggggactgtgtctcccagctctgagcccagggctttctacagcgagagaaagagctgatgtacctgccaggcacccccatcccaacacagcagacatctgtaccatgtgtgttgtcactcctgagggccaggaggctcagcttatcctgccccatgctgcccagtacggagccgccagccgcacggggccttggaaatgcggctggtccacagtgggatgtgctgagtataaaacacacatggtgtttggagactttgtgcacacacacaagtgcaaaatatctctaataatatttattttgattacttgttgaaatgataacattttgggtatattaagtaaattatactattagaattcattttgcatgtttcttcttgcctttttcagtgtggctgctagaaaagtaacaattatatgtgtggcttgccttctatttcttttgttctgcgccggcccagcctttttgaatagagtcacgagaacaacagcagctgcttgtgtggcctttgtgtgttcctggcccggcgagtgctctactcacgcccgcacgacagcctgtgaggcaggggctgcccagactgctggggacgtggagggtgcactgttgcccaggtgtgggtaaaaatgtatcgcaaaaacatttttttaaaaattgagttgtcttctttttagttttaaaatgtacttttcattaaattttcaacaagttctgtatttttcataaaagtcatgcataatcactgtagagaatttggaaacatgcaagcagatgccagtttccttgcgccttaaacagagcgtcctggtgtgagccctctcccccaacagccccctgctgcgatgttgcctggctgccgggcagtggggctgtggcgctgcgatgttgtctgactgcggggctgtgggactgcgatgttgcctggctgtggggctgcgggactgcggggctgtgggactgcgatgttgcctggctgcggggctgcgggactgcggggctgtgggactgcgatgttgcctggctgcggggctgtgggactgcggggctgtgggactgcgatgttgcctggctgcggggctgcagggctgcgggactgcggggctgtgggactgcgatgttgccgggctgcggggctgcgggactgcggggctgtgggactgcgatgttgcctggctgcggggctgtgggactgcggggctgtgggactgcgatgttgcctggcttcggggctgcggggctgcggggctgcgatgttgcccgggtgcggggtgcggggctctccgaggccggctcatcgtgcggccgctctggtctcagccctgccggccatggtcaccgtgcccagccaggtgctcttcaccctctttctgctcacccatgcctacccggaaagccagctacagctgggtataaaggaagagaatactggccctgggtgaggtgtggcattagtggcaccttctgggctcctgggcaggggtggggagtggctttcttgagcagctgggatcattcattgactgatttttggataaatgaggtgttagtggaccttgattcggaagattgtgaaagaggataatgggaaggcctggcaccccacggtcctcagatgtcagtgtttgccagccccgcagaaagggcaaggtgggcgagagggccttccattacccagcgagggctgcgcctgagccccgcgagttcccctggcttggattagggggagccaaaagtgttctcactctcaccaccaagtgctttgtatgcctgtggcaacacctttcctgttccagtgaattagggaagtctaggtgatgggaggctcttcagacagacctgaagcgggtggttgtgttctcagggtgccctgtgtggtcggggtgacgttggtctgtggaccatccctggtccgtcttcccatttgtgctgggtccttcccaggtgcttcccagctggcattactttggggtgtccgtgtgcccgtgagcctgtgaattatcaaaggtgatggtgtggagtgggggattcctgaatctttttcactgaaacacctacctcgagccaaatgttctcttaaaacaacaggtggcatctcccaccttgttccccacttttcaaaatgctggtgtggcagcgagggcccctggtgcaagcggtgtctgtgtggtgctgccccaggccttgtgggtgggcgagcgggtggccccagccctgcgtgagcactgagtgcccgccccctcctccttgcaggtctggccgtgggcctgggcttcggggcactggcagaggtcgccaagaagagcctgcgctccgaggacccctcaggtgagccgggcccttcagtgggaggggcagggtgggccccgggagggttgagcctgtcagcccccagccccacctgtgctctgggagtgtcagccagctgggccgcatttgcatggggttccacgtaagtggcgtccctggggtgatgaggctgttcatacagacagattgacctgctttagagggggtgaggctggaggcccttcctcctcccagcccaaagtggccacccagccccttctttttggctgcctgcacatccacacgccttctgcacacctggacaccttacacaccccctgcacacccactgaacacccacacacaacccctgcacacccaccgaacacccgcagaccttaccccttccacacccagcgaacacgcgcacaccttacacaccccttgcccacccaccaaacacccgcaccttacataccccttgcacacccactgaacacccacacacctccttatacctcctgcacacccaccgaacacccacagaccttacacaccccttgcacacccaccgaacacccgcacaccttacccctgcacacccaccgaacacccgcacacgtcacacaccccctgcacacccaccaaacacccacacatcttaccctccacacacccacgcacctttttacatcctccacacacccacctcatacctgcacacctccttacacaccctctacacacccaccacacacacctgcttacacagcctccgcacccactgaacacccgcacacctccttacacaccctccacccacccaccacacacctgcacacctctttatcctccacccaccctccacccacccgaacacctccttacacaccctccacataccctccaaacacccgcacaccttgcacaccctccacacacccacctctcacccacacacctccttacacaccctccacacccaccaaatacctgcacacctccttacacatcctccacacacccaccgaacacccactgaacactgcacctccttaccctccacacaccccccacagccacacaccaccttacacactctccacacactctaccctctacacacccgcccaccttacactccacacacccgcccacctccttaccctccacacacctgcccacctccttacacaccctccacacacctgcacacctccttacatcttccacacacccacctcatacctgcacacctccttacacacccacctcacacccgcatacctccgtacacacccacctctcacccgcacagctccttacacaccctccatgcacacacctccttacacacccacctcatacctgcacaccaccttacacaccctccacacacccaccaatcacccactgaacactgcacctccttacccctccacacacccaccacacacccacacaccttaccctccacacacccgcacacctccttgtaaacccaccttttgctgctgccctgctctctggaagtcgctggtctggccgggtcaggtgtggctggggacaggcgaggtgtgcaggcagaccctgcaggcttctcctcaccagcttagtaacctggggaggctgtagtctatgcagaggcacctcacctctgacgtgaaggtcacagccagggtcaggcaggtggtcaggtcaggacactcatcccactgaggttggtggcccgctgtggccgggccctctgtggagaggtcctgcgaacggaccacgctgaggctttgggcattcgtgctgctgtgatgaggagtggggcgcactgagtccctgccgccttctgcctgtgaacaccaggccgggctcctcctcaggcctcttcaggcacggggggcgggccaggtaggtgcgaggtcagcccagcaggggctttcctgttagtggggcctggggtgtggagagcagtgccaagggaaccgtctgcgtgtggatcttcctcaatgcctctggagttctgggccaagtcccctggccccggcccattcagggaatgtcagctcattctggtatcacgcccttccacccccgtccatggggacccccagagacacccagtgtctggccacactgcagccctcacagccctgtcttccagcctgggctagcctcctttgggggccctgccagtccccggacagccccccttcacccaccaacgctgccttctggggcaagggcactagtccatcccacaggcccggactgagtcctggggacacgggcggcatgcacgtccttggaaggggctgaggacggagggcttagcaagggtatttttagcgttggtgctgacactctctgggaaatgaagcctgggtttctctggaaggagaagccagccttcccctactgtcccctactgtcctctccaaagctggctgttctccagactacctcatccaagcagggaagaggccaggctggcttcacagttacagctagtgtcctttgtcagggacagtggtgaccccaggctgggggttaaggggcccaggcattgttagccctgagagggggacccgaggcttaggctggagtggggtggccctgggcagccccaaactgtgctccagcttcctgaccaggccctggcaccctctggactggaggacaccggccaccctggctgagctctgccctggaaggacctttcctgagctgggggcacactgccgtagccctgggcccatccccacttgccaggtcattctcacagccagccctgcctgggtgggggacatacctccagcctgtggcattgaccagctttgccaatgggctacctgggaaagcccggattgggccaggcaccgttcccatctctcaggagtgctgctgctagcctaggcctactctgtgtgtcatgaggagacagactgtccctcctctggcctggggcagtggcctctcctcaaggtttgcctctctgcctgcccctccccagggacccaggcccaagcccccagcccacaagtaccacaggcctagggggcagaggggacattgactgcctttcctttggtgctggcgtctgctgctgcctaaggcaagggggtggccgagggacccttctgggcccagccctcttggactcgctctgcccatgggtcatagctcagcctcccagggcagctcagcctcttcccgcagagctaacatctcccaccttcacaggtcccttcctgctgtctgggaccctggagtgagcctggcccctttccacgtagctgcctgcatgtgtgggcagatgcgggtcttctccgaggctcctcttccgggcccgcagggcctccattctcagggcggcccgccccaccctggtttctcaggggccaggctgcacccggctccggggcagagggcagtggcacggtcacctctctcttcccctgctggggacctggctccgtgccacccgagcgctgtgccaggcctgaagtgatttgaactgaggcaaatgctgggtgctgtgggggccagagaggaggaagccgcactgcgacctcttggggcttgagatctaactagattcacaggacagaaggcaggagaagctccgaatgtcacaagggctggaggcccggcgacaaggggtgctgaggaactcagggaaggtggaaagacttggagccccagatccctgctcaggcctctgtctgcctctggataggggcacctccatgtctaggcagcactgaactgatggcccaggataggggggaagctagagaggacccagcagccctgggccacacgcctgctggcagttgacttagccggccttctgctgctcctgagtcgcggccctcagccctccccttggtggactggaaaaaggccacctgcacccttggggtcactgcatgctcatcactggccagctggctgcactgagctgcagggggcctctgtgggtggacgggagagacgggcacccctgggctgtgctgcccttggcctgagcgccgttcccttgaggacagccctctggctgaagccacttggccccatgtgcaaatgcatgccgaccccacaggtgcagcgggcctttgtgcagtgccctgggtgggggtgcacagggcaaaggctcggcacctcctcacctggggtcctctgggtccctacatccctcttggttcccactcccacgccccttccagccacaggcagcaccatggccctgtcacggcccgccaggtccccatatggaagggagaggccctttgtgtgtgtgcgtttgtgtgtgcacatatgtacgtgtgcatgcctgtgtgtattgggaggcgctggcgtagggcctgggcatgtggctcacacaggcttggggaggtggacatggaacagtagttagttatgttgctggttttatggacgcctgggaggaaggacattgtctgagcctccgtctgtatcaggtggggcttgccatcccactcccagacccccccgagtgccgtggtgacccctcttgcccgcccacagggaagaaggccgtgctgggttccagtcctttcctgtccgaggccaatgcagagcggatcgtgcgcacgctctgcaaggtgcgtggtgcggcactcaagctgggccagatgctgagcatccagggtgagtgggcgcgggggctgctgccccgggactgcgtgggctgctgggggggtcaacttccagggccgggagcagtggccccaccaaagctcagtgggcaagatgtgagcaggctggggagagatcttagaagataataggcctggtctccagacgggtggctctgggtccaaagaaacacatggaataaagagcagagaggaaaaattgctctctacaggtggtcagaacacaggtcatttcaacattttactatgttttattttccaaatttcttttgtaattatgaaaaactctgcatgttgagtgtaaaaagcccaccttctcaggtcactgggcggaggctggggctcccgggaagctgagtggccgagggcgtgtgtgcgagggctcctgtctttctggcctcacccgtgctcctggtggggagggtgtggtggccagggcatcccaggagtgtgcccgcccaggtcctgggcgcacactttaatccccaggttcgccctgtgtcattctcctgccttccagatgatgcctttatcaacccccacctggctaagatcttcgagcgggtgcggcagagcgcggacttcatgccactgaagcagatgatggtgaggagccaggggctctgcccactctctgtggcctcggcccccactgggtggaggggacagacttggggcttctcccggtggcccaggcagggcatgctcagagcccctccctggccctgcccttcagaaaactctcaacaacgacctgggccccaactggcgggacaagttggaatacttcgaggagcggcccttcgccgccgcatccattgggcaggtgcacttggcccgaatgaagggcggccgcgaggtggccatgaagatccaggtaggcggcctgatgcgcagtgcctgtccctatgggggctgcaaggggcagagctggggcctggctcatggaggcctctacaccccacgtcccgcagggcaccctctctcctggcagggccatatgtggtgtcttctggccccagtgcctggacggcaccagaagcttgggaagtatttgctaaatgagtgactttgggggcacagaggggcccccagcaagcttgatttggggtgggcaaggacaggggacaagtgattgctttttggggccagagctggtgggagggtggccgtgagctgttcccaggggtgaggtgaggcaggagtaggtggacaacgaggctgtgatggggtccaggtcacggcagcatggctgggtcttagctctggttctccagggtgtgggctggggccaggacacagctgggaagccagttgggggttgggggagtgccccaggcagggcccacccgtctccctgggctaactcccctgcctcacccatacccccacagtaccctggcgtggcccagagcatcaacagtgatgtcaacaacctcatggccgtgttgaacatgagcaacatgcttccagaaggtctgaggctaggtggttgggtcaagggcaggagtgggtggcaggcatctgtgttgggttctggggaccagagggggtcctccctgcagagcccccttcctcgctgatgccctcctccctggcccaggcctgttccccgagcacctgatcgacgtgctgaggcgggagctggccctggagtgtgactaccagcgagaggccgcctgtgcccgcaagttcaggtgtggcccccggccgggccccttgcgtgtttgcaccagggaggcagaagggaccatgttcagcagctggtgaaggcccctccagctctgaggggcagagggctggggttgcagcctgggccgaggccatatcctgcctggggtgaaggagggccctctgcctggttggggggtgtgtgtggggggggggacggtgtggagggcctgtggctagggcgtgacctccctcccctacccagggacctgctgaagggccaccccttcttctatgtgcctgagattgtggatgagctctgcagcccacatgtgctgaccacagagctggtgtctggcttccccctggaccaggccgaagggctcagccaggagattcggaacgaggtttgtctgtgccagcagacaggtggggccagggtggccctgctgtgtggctgtttggtgacctaatagtgtgagctggggacttggagccctgaggtgctccctgggggtgaggggcagtgaagtagcaccagtgggacttagggggacacaggggagctgctgccttccctggcccaagtaacactgggaatcaaacagtccctagggtagggtgggtaaaacaggaggcaggggcttctctggccccagtctcccagggcaccaggcagtgtggtgctgcctgacacagacccttcgcgctgtccacagatctgctacaacatcctggttctgtgcctgagggagctgttcgagttccacttcatgcaaacagaccccaactggtccaacttcttctatgacccccagcagcacaaggtgagccccagggtgggggcacccgcagccaggcctgagagcttctccgaatggggcacgtgaggccctggactgccccttgtcctgggaaagtcagcagagagctcagggctctgggagtggggatcctcactgccctctgttgcacccccttcccggccccacacacccgcaccatggagcaccagggccaaacttctcctggtgtctctgtccccaggtggctcttttggattttggggcaacgcgggaatatgacagatccttcaccgacctctacattcaggtaactggagaggggccctggccttggtccatgtttttctgaggctgggacaggatgctgggggactcggggtagggagaatgactgggttcctgcccttgtgtccccatctgcgctgcctgcccctcaggtctggtgacagcaggcagttaggctgacagctgccaggcgtggtgtcacagcactggccgggggccctgtgcagggagaggatgagggtggggtgggctcgggtgtggcacttggctccctgggatgtcgggagctgagcttttcatgctgcccacggtcccctcctgtgcctctccccagatcatcagggctgctgccgacagggacagggagactgtgcgggcgaaatccatagagatgaagttcctcaccggctacgaggtcaaggtgagcagggttgcgggggatcccctgggcctgctgacccagggcccggctccctgtgtaagaatggatgaaagcacagggggcagctgccctcaaggggcccccagagcccgggcctccttgggcacggtctgaaagctggggcccaccccggcccatgctgccctgctgagcgtgagattttccgagtgggccagtgagttggggacttgtcgtgaagctcttgtttctgcctctcactcttgcccacttagggcttggggttgggcctcgattgagccaacgtgcagagcaagtgggaagggaagccccagccctcccctcatcgagcctccctggggggagttggaagaaaccttagaagccttttaaataaaggggaacggtctgtgctggtgccgcctgaagccacccacaaagtggcattttccgcttgctgcttgacagtggggaaggagttaaagaaatccaggtcaagccttgggtctgccgtctcataggagtgtcatttgaggcttgtcagtatctctgagccccccttatctcagctgtaagcgctcagcgggcagcagctctctcccgcctcttccttatggccactcgcactgactcgattcctggccgccccgtccctctgaccaccttgggctgtccctggcggcagctcctctcccctgctctgctggcggcggcttccttaggttgctagttcccgtgggcagacacacggctgctgggtgtgtcttgggtggactctggcaggctcagacacgcatggtgggaggccctgccagcttaggcccacggactctgttctttttggccagaacagtgttttgttaaaactctgtatgagtgccacgaggcgggacgcatcctctgcactctgccacaggccccgccactcccttttgtatcacatcagcccagtccatgttaccctcgtgttcccggcccctgtgggtttgagtttatgcccattaccatgatgtaatccagtttacagcagagctttgaatgagaactcagcgccccgggcactgtgggaggaacccgggctggtggagggctctggtgtctcgccgccatttatccttcctctcttgccccaggtcatggaagacgcccacttggatgccatcctcatcctgggggaggccttcgcctctgatgagccttttgattttggcactcagagcaccaccgagaagatccacaacctgattcccgtcatgctgaggcaccgtctcgtccccccacccgaggaaacctactccctgcacaggaagatggggggctccttcctcatctgctccaagctgaaggcccgcttcccctgcaaggccatgttcgaggaggcctacagcaactactgcaagaggcaggcccagcagtagggctgcgggccacgcccaggccggctccgcgggaactctctccctcagacaggccaaaaaccagtagcgaggtcgtggtgatgctctttttaactcctttgcccaataaggggggtggctgcctggagccccgtagccagcgctttccacggtttctgttgctaaatggttgtagggtgagaagtgcaagaatgaagatgaagccccactgctcggtcagtctgcctccgtgtgtcctctgaaataagcagatgaagatgaaagggcaactttgttttcttctttttcctgatgtgaatgttaagcagaagggagagagtccttactcccttccaatctctgttcagtgcaaaacccagaaacatgaacagatacgattgtgggattttatcatctgtgtagtaggtgtgtgtatgtgtttctagagtgagatttgtgttttctgcccttttcctctccagccgatgggctggagctgggagaggtgctgagctaacagtgccaacaagtgctccttaagcctgcgaggcccaggcctgtggggctggttctcacctttgacagctgaatgttcctaaagaactgctgccccacagtgagggtgggagcagcggaacagggaatgccagacacaggctcgctgctgctggaaggcggggtgggacttccttcctctgtccggagaggcacaggtgtcaccagttccagccaaaggctcctcacaggcgctgtgaatttttgtacaagtcttgtaattatcgaatcaacaacttgtttcaatttaataaaaatgctcatgggaagtgctttggcgcgtgtaccctcttctgtattctggagaatgacgacccgtatcttctagctcgtggtggtggttcttttctgacctgacggtcagcaggttcagtgtcacagcccatttgcaagggttgggactggttcagcgtgaggcccttggccctgaacctggaaggctcagccccgttccctgtaagaagggaggtgggaggggtggagaacaggaggagaggttgcggtgtcactgccccagcccccgggaggctgtaccacactgctgaagctgctgtacctggtgatggtggcaactgggaggacagtgacacctgccagcacggctgatgccaggtctgcatcacagtgagacgtctcctctctagacatcagctgcagttgaggaccacgtcctgaaaagtggcttttcctggggccagactgattcctagataacaggacacactggacactgagctggggccctttctacggacctgtgagcagttgaaagtgcatctgcagaatgcacaggcccaaaagaggctttgagaggtataggctttcagggttcttaaagaaagaaaatatagtttctgaaatttgggattgccgagtagcagacccagtgggctccgggacaggatggagaggcctgggtggcgtccgtgaggctgcctggctagcagcggcgcccagcaccactgtcagatccctggctgaaactcttgtggccctcttcttaagggtatttgctgttgtctagcaaactcctctgcagcactcagatctgaagccatcgccctgcagagtaaacagcaggggaagaacccaggccagccccagccagggctctcacagtctcctcttcctcttgaacaacaagccaaacaagtcaagcagcagcatgcggggggaagggagaggagaacaacagcagccagcatttgcttccccaggaaccacgaccataactgctggaacaggagaagttttctaagggaaaactggaatgtggtttgtgtgtcctaagtctgagagccggctgagaactagagccctccctgtgaagacagtggggatcactggattgcaaatgactttaatccccaagtaaagctggctctgaagctggccacacatacttattcttttgtacctattttgatttttacagtattgtgatgaatgactccccgtgctcacccattcacactgagacatggggcatgagaacatggcaaatcatggcttgattttcccagggtctgtgtcttcgtgtccctaacatctagtgaagggctggacaccacacaacaaaaaaatatttgttactgtaggctttggcggttactcataaggacaaaacactaaaccataggctagaagttagattctgagtgcattaactcctgacactccaagtgggcctttttacagagggaaaaaaaaaaaaagaggcccagaggttaagtggcagaatgaggatttggaacaagacagtctagtcttacag

SEQ ID NO: 120 - DNA, 89441 bp, Homo sapiens
  source 1..89441: mol_type = genomic DNA
cctaggtaggtatatattttaaacccaagttggaattgactttattttactatttttttaatgtttcctattcaatactctttttaaatgactttaaataatggaacagaattataacatatggatatgacaagtaacttactgacccccttctgcagagttgattttactcttctaattcctgaatatacctcccactagttccctgggacaaaatttccaaaggtgagaatcttgggtcttaagaaaacctttaaggcttttgatccacttgccagactgccctctggaaaggctgtccaccccgcacatacccgcttttcgcaggagaggactgccacccctacattctttggcaagggacttctttttaacgaataaaagagcacaaagggcactgtccggcctggacatcaagggttgcccgtctgaagcaggaaaggcgtgcccttgacggtgactcatgtccgtgacccactgccagcactgggatacttaatgtgcccgcagaaagagaagggcccacttagagttaacagattcttaagagccaacaaagagtttttctgggtgtagaataccaagtacagcaagggaagtgaccttgaaaaaaaaaatggaagttccccccagacgaggtctggctggctgtctggggccagcatgctgaccttcaggtcttctggcaaagaatcaaggtggcccgagtgagaaaacaagttagtcataaacagaccaccacgcgtctcctggctgactgcgggcacctcgggtctacagagagccctgccaacttctacttcctgcagccacgagtggaccaagaacatggcagccattcttctcatagactaaagcaactttaagataaggcatttgaggaaggggagctttatgctgaccattcatcatattcagaaaaagcaaacagtgggaaattctttgctacaatcactgaaatgtcacgagacaatgtcatagtgcgaaagggaagccctgcaattcaactgaccctggaagcctgctggaataaaagtcacagctgagccaagagaattttgcttctattgaagaaaaagtgctttcaaagactctgtcagaaaatcaactcataatagtaacagtagcggccatgcagcgagggttgtttgtgtggccacacaggtattcctctcatctgaactacatggaattatcatcctcctttcaagaaaagggactcagaaggattaggaaccccatcccaggacacaccgctggcaaaggtctgaggcaggatccaaaggctcaggtctgctggaagccaaaacacagtgcttgactggcttggagacctcacttgtacttgaactgagccacccacacgcgcttcccctgtacttacccccggagaggagtatggcaccgtgctcgtccaccaaagtcagagaagctatgtcaggcagagaggtgggggctgcctcacagacagccaaggcgtgaaataaacacaaacaccattttgtaatcaatgatttttatctctgaaaatggaagcaagtgttttgacagaacactatggccactctataagagccgacctaggagtaattcactgtcctcttctgggatgtcatggcttaaaaaaaaaaaaaaaaaaagacaaaacaggaaaataatccacaatgctttgggcgcctactctgagcttggctgggcatccattcattaaataagtcataagctacaaactaagatcagggtaactttcccttgccctcctgcttctctttgaaccacatgccctacggtgtttcaccaccatcaacaactttacttcattaattcgatatcagaaccttaaaacactactgaatcttagacaaaaggtcctcagcagattacattgataaagaaacaaatacagatttgaatataagtcattgccattattgttttctttacatctcatgatccacttcaatattaaacacatacatacacacacacaaaaccacatcaaacattcagatgccctgaaattgtggagacagcactcccagtattggctggataagaacatggtcctttttctacacggacattactccaagttcggctgtcaccacactctgccctcaccctggctccctgcatacagacgtttccagccagtcccatgcccacaccagcacgagcatgtgcaagaattcccttcgtggtcccaatggcactacacatttcacgttcaatcacagacagcccttccaaaacagaggctccttaaatcttgtttcccaagcatgcactataagaaactggaaacggggcaaagttccagctaaccgaggaatgaacaggtgaccagagctcagtctctggccccctccgagtccggggagcctctgtgctttgacgcagccttggtgagagatggagaggcagggcaggttagttgtgcggagggacatgtttgtatgcattaaagctacagcagaggtctgtgctcctgtttctgcttcactctctatcattctcctcagtctcaatactcattcaatcgcaccctctggccttgtcttagcttaatgtggttagagctaaaaggcaggaaggaaagaaggaatggctgggggagccctgagagaggtcgcagcacatgtgaggaagagggtagagcaggagctttgttggtggaaggagagccacttcctcctccaacacagcatggggacagcacagggaaacaggatcacccagggcaaatacccctctccacatgcccacatttttagtccccaccactgtactcaagagctgggcaagctgctgaaaagggcaagaaggaacactcagcagtacacgtcttcctgtcctgggcacccttgtcaagtattgaccaaaacctgaaacatgatgtttaaagtgatgaatgcaatatgatcctaggtgtgtaacaaactgcagaaacacatgctagtttgggttagattataatcatctgaagcacaggataaccgagaagcaaaattccattctggtacaaacacccaatttctagaaaagagaaaggaaaagaagaaatacgacgtgagcttttttgatcagaagactccatgaaatgagagcggtggtaatatgaatccacgtgatttttcaagtcttcctgttgtacagtcatcaaaatgaccaggtttgtgctgcaaaggagccagcaccatgtggctactgctttgattgttctcagatgaatgtttatacaaaataatatcttatcttcatttagtttataaacatacacagtgctgtccctttcaaattaaggaaaaaaaaccacacacacaaatactgcaaagtagcaaaatacaaaggaaaacaaagctacttttggttttggcaacattaaaaaagaaagaaatataaaaagcaatgtggcattggtccctattcattaaaaaaaaaagggtacttgggcacgacacaatcagaattagtttgttttctaaaattcagagtatctgggattttaaaagtagcactttttaaaaagttcaacaagtcacataacacttaaaacatcaaaaaagctttctgataaaaagctcagcttttaaatcacgttttgtttctgcaaatttgggagacaaattgagttcttactggaatgtggcctatcgctggttgacaaatctgaaatggaatgtctccaaatggcagtgcctccctttccgccctccctaggaccacaccaataaccagctcccaagcacaagttcttgctcccattttttctgtaggggtgggggtgggaccttcaggctgctatctttgccatctgctgttctaacttggaaatacgctcatcttgattgcagattgtgtcttttatagatttgatctcttttaaaatctcatccaacttggcttcattttgctaagaaaacaaaaaaaggaggcagtgattaaaatgcagtaaacaaagttcaacactgttcaaaacttgtaagatataaaatgtagttttctattttgcaaacggcaagccatagtcaccaagttgaaaagagaagtcaaagccctactatgtctggggctttgaatgcaatgagcactggccgatctatctgagatcccgtggcaaaacaacagtgtgtcacagtgtcacagtgccacttctgatcccgaagcctgtgcatttactcaaacaaagggtctcctgggtcacagttagactataggacaaaacaggctccttcaacagtgtcctacgtcctaaccaccccaatcattccatcaagagtaacttctatctgaccagagagaggggtgactctcccagaggctacagagctcctgccatctgtgaggctccttcttgggagggaaacccttgccctgtgtgtccactccttctctcttacccaggacctgctctcccggcaacagcagcactctccagtggccgcagcgagtcaaaggcaggcttgattcccaattccccacccaaagggctcttgcctaaatcccccttgttgccagccccacaccgccagatccttctgtcgtagccactcagctacatctgaacacgtgccactccctccttccagggacctcctctccctggtgcctatgaccccacactcccatgatattttatttctacccaaatcagagaagggtttaactagtttggcaaaagacaggaaaaacccaagaggctcctgttcacactgagagataggaggaaactgatacctatcccaatcatggtggtctgtggccacacttggctcctttaatggggctaaaggagctttaactccgttaaaggaggcaagtgttgccacaaaccaccaccatcacgtgaccgaggaccttctcccactttttcatttactgaaaacccctgagcacccagctgggacagtactcgccgacgccctggaccacaagggctttctagaggataaagcctgaaccagccaagcacccctgcactccactggtcctcaccacactggccgtgtctgtggttttcttggggatgctgatcaggtcgcacttcttgtttgcagtgggcttgctatccagaatgttcttcttgaccaccttgagatccctgtttttgcctggaatgtacccgtgcttcaaggagatgaggattgggtctgcattcttgccttcgaaccactcttctgcctccagcgcggcctctggccccgctgtgtcaggatacaggtcatcttggaaaaggtcagactacaagagacatttggcacccgtgggtaaggaagaagaaaggcctgggatttttgaattttatttttacatttgtttaaaatatggattgtctagaaaactcagcactcaccttcctgggaacagtcataataataggttcacactttctctcatgaagtttgaagaatcttcagaggggaaataaaggcaaagttgcattaagtgaaatatgaggctgactaacaggatgaataattagttttctacaatgctgtctgaaatgtcaagtgcttctttacccatccccacatctgatccaccccgggaataggcagaatttagtgttcccggttgacagatgagagaacggaagctgagagtcactatgctaggaactggcagactggagacaagaaccatgagtagaggtctacgtatgatgatgacaaatgccaattatctgggggacagaccaactgtggtggaaataatagcaacactgaaactgactcacttatgaaaaaattaccatgtcaacctacaggagagaacacacatctgttagattgtatctacaacgcgggtacaaggtcttctgccagcttgaggtggttgaacatataagtataaatatgacttttagaaagcaaaagaaaacaatcctaggattatgattttctcatcctagcaaaccacatcgtacatgacactcaagaaaaatgtgaaactatccaaaatgtggaaagagaatgtaaagccacttgcactgtaatactggaagaagggagcaaagagctctgtaatggggaagaaaggtataacatttttatttgtatcctacaagagaactaaacagaccagaaatgacttctcttatgatgaccctgataaggtcaagccaattttctttttcagtcaagacgggaaacaacaaaaaaagtctctaaagctcctggcaagagaggtagccttagtgagcatcctggccagatcaccagatcaaacggctggtgtgcaaggggggagttgaatgtgggcgtcaatgctgctggggaaatgttttctgaattccaagagtttaagtcagagaagacacagccacatcaaatatgcaaaaccatttctcctggaaacctgcagcctttggcatctgaaactgggcaggagtccattgaagacaacctggcagatacactgctctaacgcatcaggggaacaaaagctgagtagagctcagggtggtaaaggtttataaaatcatcatcctctttaaaaggaaggttgtgtcaaatgtgcctctttactatttcaaccaaaaactaaaagagtcccagataaaccaaaaaccttttttttttttttttttttttttttgggactgggtcttgctccatcgcccaggctggagtgcagtggcacaagctcattgaggtcttgacctcctgggctcaagccaaatcctcagcctctggaataactgggaccacaggtacgtactaccacacctggctaatttttttaatgttttgtagagacagggtctcactagattgtccatactgctcttgaactcccaggctcaagtgatcctcccaccttggcctcccaaagtgttgggattacagggtgaaccaccactcctggcccaaaaacatttttaaagactgatttaatgaaaattctgtggttagtatagccaataaaaagactgacttggctttgacttccagctctactaccaaaacccacgagagtgtgacaacctcaccaagccttaagttcttcatccataaaatggggataaaagttacacctaccacatatgattgttatgaaaagaaagaggtagcaagtagcatatttagcacagtcctggcatacaataaatgctcaagaaacacttcataaatcggagacattctgaacaactgtgtttatagtctgtcgaacttttagatgacaacaaatgtgtttcaaaatattggatgtaatcataaatttgaattcagtctattttgaaccatattttgattagtttggtttaaaccacaattttcaattatctttaacagctttccttcattattccaactaaaaaaaaaaaatcacatagagagttttggtttgtttgtttttgtttgtttgagacggagtctcgctgtgttgcccaggctggagtgcagtggcaccatctcggctcactccgcctcctgggttcaagtgattctcctgactctgcctcccaattagctgggattacaggcacccacgaccacacatagcaaattttttatttttagtagagattaatataaaaaaggggcttataaaaattctcttccttttatttggaagacgtaagtatcaattctttaattgtgagaccagaacagcaagcgttttaaaagtccacataaacacagtgttacacaaatgtttggtacgaccttatatgtgatgatgtagtgctaattattctgttgtttgaaatggccagtggtcactgagtctcagaggatatatttgttgactagcatgagaaaaaagcctgtcccttaggaagcctgctagcatttagaatatgaattttctaaaaatcagaagtagtacagagaggtagaaattatatcatagctgaacttcctaaatcaagctaacctaccgccccattataggacctttggtttctctattttaggaccagtggggccccaaatacagttttgactctggttcttccactcatagggtaggaaaaccacccacttttccatccccgagccaggctctccctacttgcccaccagggaacgctgaccatggcctcagcttgaagattaaagatgcatgtttcactatttcagtaggtgtgcaatacaccccagctatgctgcttcattgttgcacttcagttatatgggcaggaaatgaggtattaattccacagtacacacaaggatagaaagacttgggcttcatagaatttcttgtagctgtattgctctggtatcaccaggcattcaggtgatgataaaaagtgagatgtgccgggtgtggtggtgggcgcctgtaatcccagctacttggaaggctaaggcaggagaattgcttgaaccagggaggcggaggttgcagtgagctgagatcacaccactgcactcctgcctgggcaacagagccagactccgtctcaaaaaaaaaaaagtgagatttttttcttttcttttttttttttttttgagatttttttctaatgaagaaactcagttttagtgatatccttagaaagtgccatctcatggcaatgtgtacaattctactactttcttgctcagaatggtcagatatttttgagatctgaagtatatgctagtccaagtacaaataattgtcacacagttacaccaacctagaatacttgacaatctcgattctttacctggcaatctcacatttgttaacatcaagtcccctcttgggcatgtaacccatccctctctgaggctccttgctgctgaatgtgttgaggtagtggacgtacggggattcatccgtgatctcaaaatagcgaatactgctgtcaccctgtaagaaaccagagacaagtctgtgtctgattgttaactgaaacatctggattatgggggtgtctctctcctctacaaacccagcagtagttgggaccccgcttcagtagctgaccttttcttcctcataaagaggcttgcctaaagcatataaaagtttcttttcctcacaaagtaaccccttacttatcaaatgctagcatgccttttaagtggtctcctcagcctcctggctcctggctctaattttactcccctgagcctaggcaccaggccagggttagggcaaaaatgttaatgcctctgccaaacagctacattgcaattcaactgtgaaaaacaaacaaacaaacaaagactaagaggactgctgagaatgcaattattgatttaagtattcatttactggcataacgcaatgctgttatgccagtatgatgataaaaagtgagatttttctaatgaagaaactcagttttagtgagtatcctcagaaagtgccatctcatggcaatgtgtacaattctactactttcttgcttagaatagtcagatatctttgagtactgaagcatatgttagtctaagtacaaataattgtcacacagttacaccaacctgaacaatgacggcaatcttgtctggcagagaggagatatacatatatgtaagaaagaagaaggcaaaaatagctaggtggtatcatgcctcaacagtgctcccagttctcatgatttccatttgtctcaatgactgagatatctaaagcaatggaaaagaagctaaacccttactagtcatttctgcatgcccaaaagaattttccatctcatgttactaatatctgagtaactgctcattttgtttgttttaattcagtcaagggcaacaacagcaaggtaaatgcacttaacacctgttaacatctgcagtaaaatggctttcaaggaaacagacaagatctccatttctaaaacaatgacctataaaaatgtaaagcaggtctgcagcatgctcaatcagctatgaaaagcaaacaccagctttaccacccagtgaagggctatctaacaggtctagggactacctcaacagctccactgttattaattcatttatttcaactacaaaaagttctaagggaaattgagcctacaagaaaaaaaagggaactataaggttcccacttacaaaaatgaaataataaagctacccacagtctaggtatgctgagctcataaggcaggaggaaggtttttggagttcagtgtggagtctccctataactgttatcacccctgagctttagtcaggcctcatatcttcaagcccagagccctagcactgaaccccaggaacaagaaccctctggagagtctctgaggccctcaaaagtttgcatccacaaagcaccattctccttccaagtccatggtgtgtggtactaagtatacacatgctcatctagggttatccaacaaatttcagcattagatgtggccaactggttgcccatccctgacataagtacagataaatctaaaatcaccaatcaggtagcactgctaggtgaagatgaaacaccagtgtatcttctttttttcacaagagcgccctgattggagcattttccccaataccccagcccaacctctgcttcagtcaaaagtatgcaacatggcgtgttatcactgcacaactggcaagctgcacacagtccagtctcaagacctaaaaataccaaattatctgtccttggcttataacatacacacacaaattagaaaaattaaacagatacaacacattgcccgtcctctaaatctctgaaggataaatgtttccacttacaggatttaacaccaaacatcaaaattactgtttacctttccacataagtaaatgatgctggtgtcagggtcatagaaaggcagcaacaccccattgctagtgtccatctcatgaagagcaattggttcctgcatatttttctggggggaagataataataatacatatatgtgtatgtatacatttttttaaaaataaatttttataaccttattatatattcttctatcccaattaagcgagccattttcctagaataacagaagtttgaactatgcacatacaatactcatacatggaaacagcaacagggatgctaaatgagatccaactcacaaaatttcactgatttgacaacataatgcgcgcatacatcagcgtgatttcatgacaatgatgagaaagcccttctcctttgttactgttttctttttcttttttttttttttaaagactgagtctccctctgtcgcccaggctggagtgcagtagtgctatctcggctcactgcaatctccgcctcccaagttcaagcgattttcctgcctcagcctggcaagagctgggattatagataggcacatgccaccacccgtggctaatttttgtatttttagtagacacagagtttcaccatgttggccaggctggtctccaactcccagcctcaagtgatccagccacctcagcctcccaaagtgctgggattacaggaatggccactgcgcctaccctattttatttttttaaagtacttctttaattataaaatatgtgtgcttttaaaaagttgaaagatataaaaaagaacataaaaatcattccatcaaaatcctacagcccagtgggtgacagaagctattatcattttgatctatttccttccgacacatgtacacagagattgagatgatagaatgtatgttgtatttttccccacttaagctaattatgaacattttcccaagcatgactattttgatttagacaactgatcatattatttatgaaatatgaacttattttccaaatccaaaacactagattcttcattctttttaaaaaatatagtcccctccctctccccttccccctccccctccccctctccctctccccacggtctccctctccctctctttccacgctctccctctgatgccgagccgaagctggacgctgccatctcgactcactgcaacctccctgcctgattctcctgcctcagcctgctgagtgcctgcgattgcaagcgcgcaccgccacgcctgactggttttcgtatttttttggtggagacggggtttcgctgtgttggcggggctggtctccagctcctgaccacgagtaatccgccagcctcggcctcccgaggtgccgggattgcaaacggagtctcgttcactcagtgctcaatgttgcccgggctggagtgcagtggtgtgatctcggctagctacaacctccacctcccagccgcctgccttggcctcccaaagtgcccagattgcagcctctgcccggccaccaccctgtctgggaggtgaggggcatctctgcctggccgcccatcgtctgggatgtgaggagcccctctgcccggctgcccagtctgggaagtgaggagcgcctcttcccggccgccatcccgtctaggaagtgaggagcgtctctgcccggccgcccatcgtctgagatgtggggagcgcctctgctccgccgccccgtctgggatgtgaggagcgcctctgcccggccgggaccccgtctgggaggttaggagcgtctctgcctggccgacccgtctgagaagtgaggagcccctctgcccggcagccgccccgtctgagaagtgaggagcccctccacccggcagccgccccgtctgagaagtgaggagcccctccgcccggcagccgccccgtctgagaagtgaggagcccctccgcccggcagccaccccgtctgggaagtgaggagcgtctctgcccggcagccaccccgtccgggagggaggtgggggctcagcccccgcccggccagccgccccgtccgggagggaggtggggggtcagcccccacccggccagccgccccgtccgggagggaggtgggggggcagcccccgcccggccagcagccccatccgggagggaggtggggggtcagcctccacccggccaccaccccatccgggaggtggggggcgcctctgccctgccgccccttctgggaattgaggagcccctctgcccggccaccatcctgtctgggaggtgtacccaacagctcattgagaacgggccatgatgacgatggcggttttgtggaatagaaaaggggaaaaggtggggaaaggatagagaaatcagattgttgctgtgtctgtgtagaaggaagtagacatgggagacttcattttgctgtgtactaagaaaaattcttctgccttgggatgttgttgatctatgaccttacccccaaccctgtgctctctgaaacatgtgctgtgtccactcagggttaaatggattaagggcggtgcaagatgtgctttgttgaacagatgcttgaaggcagcatgctcgttaagagtcatcaccgctccctaatctcaagtacccagggacacaaacactgcggaaggccgcagggtcctctccctaggaaaaccagagacctttgttcacttgtttaactgctgaccttccctccactattgtcctatgaccctgccaaatccccctctgcaagaaacacccaaaaatgaccaataaaattaaaattaaaaaaaattaaaaaaataaaaaatatatagtcaacagcctcttcaggagtatcaaaagtatgtctttgaaatacatttaccagtaagtctccaacgaggataagaacttcacatccaatctaagacaatcaggcgtttagaaaactacactaagaatcccataatctacttactcactggaagacctgctcagaacagagagaaagctcaagtgaaagcaagtggaaagcctggggagggcgtaccggattccagagagccagctgccgctcgctcatgcggctgaacccagtggtgaagacattgccatcggccaggaagatggctctcatgggtcttgctccttcatgtgctttctccttctcctggagagcaaaaaggcacatgccacacattaaactgcaagaagacaaggtgagtggagaaactcgggcacagatccaacctcaccaactgccattcatgttcacctgggtgtgggagggaggtcagtgttaaccatcccccttccccagatgaggaaacaaagagatactatgtgatctggtcaaggtccctctgtgaggctgcaagaatgccaggatttaactcagaagactcgctctctccaccatatcctgctgccaacccaagtctatgcactgtgaaaataaaacacatgaaaggactctgacaaatgtttgtttctcaagaggataataacataaggagattaggcatgccctaccatttctaccaatatcatagggcagaaagaagccttgtctagttaacgctttccttgacctcagtagtttaatgaatgcactaggacaacccttagaagatgtcgggtggagaaaacacttaacacagggctgggcaagtccccagggctcagtaagcaccagctactatcattgcccaactcttgaaaagagatgcagccaaagaacaaccacatctcaggaagggcctcagagtgtggcaaatgaggacttctcagacttactatgtgtagtttcaacaccgactgaagacccaaatgtccatcttttgtcaaggtatgtgattttgttgaggtccagtttgggtggcagaaactaagacactgagctgatgagagaacttgttgcttttcgccctgcgcatttatttatttatttatttatttatttttgtatttttagtagagacagagtttcaccatgttggccaggctggtctcaaactcctgacctcaaatgatccacccacctcggcctcccaaagtgctgggattacaagtgtgagccaccatgcccggccacctgttgcatctttaacagctgtgtttggaaaagggtgaggaattgattcatcaatattcaatactaagctgcaaaatcaggaatgcagccaattggtttaattgatcaagacttataaactcttaaggactctagtgaactgatacaaactatttctttgtgaaaaaaggctacaaagtgagagacttgagtaaaagctggaaaatttacaactctggagagaagcacaactggggagacagaagcctttataagccttctcttattcacagttggtgtctacacacaacagggtcccactgaccagtaccgctgcctgccttaaaaagcagaaagctcacactcactcaagtgctccaactactgagttttcatcctaggaatactcacagcaacaatctcttgtttcctgggatcaatgactctcactttcttgtctttggaagctgtgcagatcagactgccattccggttccagctcacattgtaaatcatgtctgaatgcatatcgtccaagtttataagggcttcccctgttcccacattccagatgataatggcattatcacagcctaaaacaggcaaaaccatcagagattagaagattagaaacacctatgtaacacactcagaaaactacagatacagtgagaatacacatatgtatatgcagagagagagagagagaaagagagagagagaaaagatgcggctgattgtcagaggccctaccagaggccctacttactaacagcgttaaaaactgaagtgacaaaggaaaaagtttgtataaaagaaataaaagtgttaaagtaaaaacacaacttgttaagtttgggttcatatgaaacaatcaaccaaacaaaaacaaagaaccacaccaaaacagaaccctattttctttaaagagttaactgggctggtagacccaagtgacttcaagtttccctttctagtaaaacaagcatcagggtgttgctgccagctttgggagacccctattaggcaaatacgctccttccttttaaagaaaactttgattttcccctgctatacaattagtacatgtatactatagagaacatatataaacaaaaggaaaaaaaatcacttttaatcccaccactcagagagaagatcattattacttttttgatgtttctttccgaaagatatttctgtgcacatacataaattattttacatacagagatgggttcatacactttacacatgggctgctttctgcacttggtggtaggctgtgacccttttcacgtgccaaataaactaaaagtaaaaggtttaaatgactgtttagggcactcaacaaaaactctgggtggcaggttattcaaatcagtgagactctaagacacagctttgggatattaaagatggtacaacagtggaagggaaaagccaagagtaaggcctgtttgctcacaacagatctgtacctttaaatgaagagaaaaataggccaagactgctctgatcatggtgagaagcccaaactgtaatcaagtagctacatagattcagaaacggattctgaaagaagcccacaatgtcaactcattcaccatctcagctcaccaactccttccttccttcaagggtctgccccacgcctccaggcccctttaaaaagaggcagcatgtgttgctcctaggatgttagttcaaggatgaagcaaaatacgggaaggacatcctagaggtggattcttgccaacaaagcaatttggaaatcatttagaaaaaatagtcactaacatccaggatacttaagttacctaagggttagaagtaggaaactggccgggcacggtggctcacgcctgtaatcccagcaccctgggaggccgaggcgggcagatcacctgaggtcaggagttggagaccagcctgaccaacatggagaaaccctgtctctactaaaaatacaacattagccaggtgtggtggcacatgcctgtagtcccagctacttgggaggctgaggcaggagaatcgcttgaactcaggaggcggaggttgcggtgagctgagatcatgccattgcactccagcctgagcaacaagagcgaaactccatctcaaaaaaaaaaaaaaaaaaaaaagaagtaggaaactggagaaaaaaactacacaacagtaacaaaagttgaagctaaactctgggatggacaattgaaccttcctctgccttcttccctataggcaaacaggtaacttcagccccggcagctggatcatatagcctaaaaatatgcagaacacgacaatcacccattctccttcacatgtaaaagggagaatgcagaccagtctgttgctgctgccctgtattgagccttgatgagaaaggtagcagggaattttccatgaaggaattccagctctggaatttttttcctctccttaatcagactgaggttctgagagaacatcaaaaatgattcccaagtatagtcgatggtgattataaaaaacatggcatcttttttgaaaagtgggccttagtttcaatagttacttggcattataattttttatttaactcactatgagtcataaacattgtgtattcccagttaaaaactgaactgcccctcctcctttttactggtgaggggaaagacctttaaaaatcctatctctaacattagtatcactttttaaataaaccacttttattaaggtataacttacatacaatacaatgcacccattttaagtatatatttgctaagtttcaacaaatgtataaactcatgtagccactactatgatcaagatacagaatatttccatcaccccacaaagttccctcatgctctctgtattgctttcataaaagaaaatgaaatctccaattttagataaaggaaaagatttctgtacaacaccagtgtccagaaataggggacttatcaagtaaaatgaggtatatccagaaaatggattagtatgaagtcattaaaaataggaagagagcttaatggcacgtgaaaagggtcacagcctaccaccaagtgcagaaagcagcccatgtgtaaagtgtatgaacccatctctgtatgtaaaataatttatgtatgtgcacagaaatatctttcggaaagaaacatcaaaaaagtaataatgatcttctctctgagtggtgggattaaaagtgatttttttttccttttgtttatatatgttctctacagtatacatgtactaattgtatagcaggggaaaatcaaagttttctttaaaaggaaggagtgtatttgcctaataggggtctcccaaagctggcagcaacaccacagagggaacacagggcttctggctcccaacaaagtacaccttctaccatatcagaaataaccaaaactatggttcatggagggccctggcaggaaccatgaaacctgctgaaattatagcaggaaattcatagctttcctcaggttgtcgaaatggccttgaaacacacacacgtgcacacacacacaagtatgtatgtgggctgggggagcagtgcaccccaatactcttcaccatggtttcctaataatctgctttaaaaccatatagcacacaaccaaaacacatttgcttccccccactcagagagccacaagagtggaagacaaggggaggaccgctgagctcagctcccacctgcactaagaagcacattgcgggccgttggatgccaagccacgatgccgactctctttgagtggccttccaaaatcaccacaggttcagtcagggaaagggtgagtccattttctgggatctgccatacctgttggacaaggaagaaagatgatccacatgaaagctattgcctttcattatcacatttacagtgaccatccactataaagatttgctctatgtaaacagaacatagagtgatatctggatgaaaggcagaatgttgtgaaatgaccgtgttaggcggttttttttttgtttgtttttttgttttttgtttttcgtttttgagacggagtctcacactgttacccaaactggagtgcagtggcgcgatctcggctcactgcaacctccatctcccaggttgaagcaattctcctgcctcagactcccaagtatcggctgtttttaaaatgtaatatgttatcggagatcaggataccaacaaggactacaaaacatttcctctcagcttttatttaatattatttgggattttattctaaattccttgttaagttcaaaactctccagttagaagcatgcaaaaaattgaaagaaaactacaaaatgattgaaacactcaagaaaaggaatgggaatgaagacacttagctaagtctgtggttcttgatgggatgacatagtttttaaaacatattttctataattttacacttggaaaacaaaaatacacttaatatttttataacatgtattatagaaaatattacaaaagaaaaaaatgaattagacctcatcaaaattaaaagcttttgtgcttcaaaggacactatgaagaaagtgaaaaaacaacctgcagaatgggagaaaataacttacaaatcatacatttgataagagacccatagcctgaatatagaaagaactcttagaattcaaccaaaggacaaataacccaattgaaaaataggccagtcatctaaatagacatttcaaggaagacatataaatggcgaaaaagcacatgaaaagatgtttggcattattagtaattacagaaatgcaaatcaaaaccacaagctctctcttcatgcccattaggatggctagaatcaaaaagacagataacaagtgttcacaagcatgtgaaaaaatcagagcctgcacacatggctggtgaaaatgtaaaatggtatagccaccatttggtggcagaccttggaaaacagcctggcagttccttaaatgattaaacagagttatcatatgatccggtaattccactcctagggatatacccaagaggatggaaactatgtgtctatgcaaaaacttgtacaagaatgttcatagaagcattatttgtaatagcccaaaggtggaaacaacccaaatatccatctatcgataaatggctgaacaaaatgcgacatattcatacactggaatattatttggccataaaaaagaatgaagtactgatacatgctacaacatgagcaaactctaaaaacattatgcaaagtgaaagaagccagacatagaagaccgcatattgcaggattccatgtatgtgaaatgtccagaataggcaaatccgtaaagacagaaagtagaatagtggttgcttagtgttggggagagtggagggaggcaggtggaggggtgatagctaaaggatttgggtttctatatgaggtgatgaaaattttctataattgtctgtggtgatggttgtgaatattctaaaactcagtgaattgtacattttaaatgagtgaattctatgtgaattatatctcaataaaacttgttatttaagaaaatcctcttgactagtgaagacatgcagaagactcaccacatcttaattggggacatgcctgggcacagggggagaaagggacagggaaagtatgagtggaaggaatgaaagactttatgtttaacaatgaacaacaaaggtttcaaaaggttaagaaacaaacaacctctaagaaaagggctgagttacaggtaagctgagtagcatcaagaaccctaccgaagaccagatattaaataatatttaagtttatgaaaaagctaaagtttaaaatcattatcttctacatgaagattaaaacaagtaaatttaccatcagaaaatgattttgaggaactagctcatgaaaaatttaagaacttgtcaatgaaaaatcatgttcaacactagaacacgtgagaaaaagaattttcctttgtgggaactttaaagaaggagacaaacaattgtctgttttcaattgcttagtggaaggcagagatctagactggatgagtgtttagggttcagctcagttctactgtcctgcaaaaaatgagaacaaaaagtttgccattctgaagagtgggaaaaagtcatgagttgagtgatttgttcatttttacagctaaattctgcccaggctaaatataaccccttatgcaaatcataacaaaaataaacctgcattttgagggcccaagcttagaacatcacctaatttccccagagccaaattttaagcaaggcaggtgtgaacaagcatagaaggaaaaggaagacctaccctgccctctccctccctctgcggaagagaccttgacccaggcctctttcccctgcggagaacatgggcatctgctctcctccattactgcatgttagctttcatcctgacatgcactatttttattcaagaatttatgattagtgaaacaactccacattgaacttgactatctgaatataaagcaggactgacattttgaacagaacaaacagaaaacagtgactactaatttgatcaaagcatgaagtcgacagaaaaacaattatgaaatgggacttcagtgactcaacaggaaaagcattttgcaagatgcactgtgaccccacttagaactgacagagtggtaataccaccttcaatctccagatggcaccccaaccatggcctgctgggtttccttgcaaggactgaaaacgcctctgtgtctcactctgagcacagctagtgcattttccaaatcactaatgagacgtggagtgatgggagactttgtttataatcagcatttccaaccttaaaatatgagggcagaagcagagctcataatggggacttaaccttttcctttctctagcttctccccatcatcttttcctggattaaaagaaaattttaatgatgaagcaacatttattaatttttaaaataaggaaactctgtgtgttccttctttacctcacctccagctggtttaacggttccctcagctgggtttattcacataagacaagcacctaagccattttactaccttggttaactctttcttgtaacacatttattgagttacaataaattgtattgtaacccatctagtactgggtaactaaatacaggccctgctcttgagaagttgatggtctaacagaaagcagagacttctatcagactgaaaatcaaagacaacaaatccaagtggtgtgatacagacagttagagagtgagcaccagagtcaggcagagtctggttcaaatcctgcctgggccactacctgtgatgatcctggcaaacatcactgcatagagaaaacattagtacctatgcctgcgaggtgtgctaagagaattaaggaattaattaaccctcagcacagagccagacacacacatagtgcctccagaatgcagagacagtacacagcagggctgagattatgggctctggccagactgatgtgactgaattcctgattcagtcacatagtggtgtgaccttgaggacattcacctaacctttccaggacttaatattgaacctgccttctgtgaggcggtttgaagactaacatggtaacatgaaactgacacatttagaagaatgcctggcataaggcagacactgagtgttagttggtattattgcacagtgcaaccaatgctatgctggcataagccgaccgcactactacgaaattagcttcctgctaaccaagcttggtccacccaggagggctccctgaggaggtgacctctaaggatgaacaagacttaggtgaaagtagagcagaatatgaggagaaattgaatatccagtctcaaaataaaacacgcagatgtgtagagcaattttctaaaaagtgcatgcagcatttaaacaatgccataaagaagctggctcaggagctgctagggaaaaagcaccagagtgaaaaagctaatactataagcacaaggactgcaatgcgagaagaaagtgagtgaaaaagtctctgaaatgaaataagaagacaacagaattcttgtgtccactggtaaagagggggtggtgttctctacggtggactgtggaaagagcttgggggttgggggcggtctgtaggtctttccacactcagcatacacatgctctggctggcacccaaaggccatgctcacaggcctgtcattatgtggctctctgccctcttcagggttgtctgctactctgggtgatggcctgctcggtttggactgatgttcctgcagctcagggacaacaacaaacagaagcaccacttggtacatgtttggtcctcttgtgtgtaatatgggatgctggcctgggtgtcagaagacacaggctcctgtcagagctgggacactaattggtcatgttagcattaagaagggatttcacttctgggagcctgaatttccttaatactggggacagctgtgcttactcaggggttattagaagggttaaatgagctcaaacattttgcatgccccaaagcaccaccctaataggaaatactgcaactagggagaagagcatggggctttctttggagctagacagatctgggtctggctgagccttttatcagctgtgtgacccttaacaaaactgccactctctgagcctgtttcctaagttgtaaaataggccacactcatggcttactgtgcggatacaataactaaatattatcatgcacataaaggcttagaatagcgcgtggcaaaaaaaaaaaagagcctaccatattttcatgatgactttttttgctgttaatatgaccactatgacgccatatatatttctaggtctgaacatcagaatttcttagaatgagtcttgtcttcaaattaattcagcactgtacccaattaattaatactaactaatttacacccaagatatcattatgtgtgaaagctctggtttatacctaggccaattaccacagtaaggacagatctgatctctgtgcaggcttgttagcttttctttgttctatggctacagactggtactgtaataccaaccagctttctcaaaactgtatgcagtgagtgcagaggaaaacagacacaaaacacccagagtaggcatctcagtgcagcagagagtacaagttatccctacttcctcttttttattttattttcttaatttaaataatgctgtgtgttcctaacattttctgtttggacaacacattactatggcaatgttttgttttgaaaggacaaaaatgaaatcagaggagctgtggtggctcaggcctgttgtcctggtgcataaggaagtgaggctcggcgttcaaggccagcctgtgcaacatagaaacctctcatctatataaccaaaaaaatgacattcagttccaagggctcctacatgaaaaagtgaatccatcagtaaaatcccattgtggttctggaaaaaaacaactttaagcacatgttcagaactactgtaccatgggcatccttttcacatgtgaaagcctggatatggaaaaaggacaactcaagagaacaatcccaacaagaaaaaaggaaaactaagacacttgggtttctctcacgtgctaattttaaagtacaattagttaaatagttttatttttcaaatactgctttccagacactgcttccctattttagtcacccatcatcaacttgctactgggctaggactagagttacagccataaaaagggttacacccccaaaagaccctatttttccattcctaaggaaaccaattccaaatgggaaatgaagaaaatacatgagacaggagaaagcttaaagatgtggtagcagctgcagaccagtacagcgtcctacagacgcccacaaaggcctgcatgtagggcatcagggcattcccaaatgaaccatgacgtgcagagtggcaccgagttcgggaaaaccaagaaccgagtgttgggttccgatctgccagggttataatatcctctggcaaatggcccagatgcaatctgtacaaaatggaattaagacgaagccctccctgctgaatgcctgagaggaaccaaaacatcacttccatttttatttcagggcaaaaactatattagaaagcattaaagctcttttaaaaattgtctagcaggttttccagtctttgtcaaatgccttcccacccgccaaaaaaaactatattaggaaaatttataatggaagcaaaaatggattagatagggtatttttgttgatttctacagaagaataaactgatttgagagaagggagaagcgtcctttaaacttaaaaatttggactattctatagctggagacaattaagactatcattttgcaatatctttccaactcccagactctggaaggaacaattatgcaatcccattgtccaaattagccattttttgcatttgtgtttgattactaccctgcagataaggaacaatgttgaatcaacatcattcactaaacttaagttgactgctctttgtattatttaaagcactattattttcttggagctaatatttcccccaagtaaaatacttaggtagccacaatcttaaaactctctttgagaagatactgctgaagaaaagaactcacagagccaaaactctgcaaagctaggagtgaagtgtagtttctgggagtacaatttacacaactgctgtgtgatagtataaaatgctgtttcacaaagtagtacatgaaaggtaaactgtgtcaatataatttaattttaggctgtgtaaagaagccacgtctaaaaaatgggggaatgtatcttaagattggtgttccctctcctaaaactgcaaagtagctgtcactaaatcaatgcccacaaaattaacaaatcaatgcttaaatgcttaggacttcatggatttataccataagtaatacaaaaagcagtttttaaaaaattacttttattcttttacagttcatttgataaactggttctactgtatttttctatgaaatgtctattaaaggtactcttgctgctaggaatccactataggtatccatcaaaatccccattacaaaaaataacagtccattatacgtttacagcttccttttgactctcgataggcatattattatcatacctccatattatatggaaggcaactggggctgagagcgtttaagcgaagcgacctgcaaatgctcagaactcctactcccaggatctccttgatatccttcttctactaaaactaggccttgttatactatctactatttgtagctcatgagctactaccaatagcctaggcttgagaaactacacagagcttttccgttaaaaaaaaaaaaaaaaaggcggggggtggcggggggtgttgtctgaaaccatttgatctataatacagtgttcttttaccttcagaagagcaaggtggaaaataaggtattaagaagcaggtaggctaggagaagatcaaacatttctttaaactttcatttcaactgctaagctatacaagcttcaattactccaataataacatgatataggggatattaagtgattaaagggtgatttaaatatcagttctatacttaaagattttttaaaattagaaagatttatcccaaagcattatttaatttacaaaatgtgcactccagcaatgccaataaaagggcgacattgaggattctgggaagatgagagaatctcagtggcagcattttttgggggtttttccgaagtccctccgtaaaaagacagagctagcagaaaacaaaacaaaacaaaaatccagggacaacatttacacaaactaggtgatatccccaaaatttaagcaggtgggagcaaacaccaacagccacacgacctgcatgtgatcagcctcgggtgtgtgtgggaagggacagcaaggggacacctgacagacctgagggcagcaggccggtgtgagatcagcagcagaaactgggaaggattttgccttttccaacagaagctgggcacatgggtactgaatttaaaaggtctgaagaggcaggcacaatctagaccccagcactctcaaaatcacccacagcgggctcccttccaggatgggcccacaaaggagacactccaggaaatgaaatcgaatttcagcaggatagcagtaagagggataaaagcataagagaggctacataaaagccaggctaggaaatattagaaagcaaggcaccatgtttctgaacactatctgaatatgtcagagagggagttctgtgaaattagagcagctatctgaaccaagccaccatttaaaaagcttgggaaaattaaatccacataaaaataagcaagaaaaaaaaatcaaggttgaactccaaaattactgtcagaaaaaaagaaaataagacacagaataagatccctttagacaatataagactgctaaaaagacatgctcaaaagagataaaaactacattatagtgattcaaaataagaaaacaatatataaaacattataaaccagaacttgaaaaactcaaaacaaagtgacagacatcaagaaaaaaattagaaataaatgaagacaaaccaagaaagaacacaagagcaaataaacacaacaaataatgcccccaaaagaaataaaaggaaaagagcaaaataataataataataataaagtctaaaaaaaaagaataaaaaaaaaaggtttagggcctggcatggtggctcacacgtgtaatcccaacactttggaaggccaaggtgggaggaatgcttgaggccacaagttagaggccagcctggacaacattgtgagaaacctcgtctctacaaaaaaaatagaaaattagctgggcatggtggtgagtgcctgtggttgcagctactcggaaggttgaggtgggaggattgcttgggcccaggaggtcaaggcatgatcgtgccactgtactccagcctgggtgacagagcaagaccttgtctcaaaaaaagaaagaaaaggagtggggggaggaaaagaaaagaggtttggagagaaactgacaatgactaaagagaagtaaagaagacaaagcatatggataacaggagcttctgataaagaaaaccaaagcaaaggaacaggaaaaaaaaaattaaaaactgtaatgcaagaaaaaaaaaaaagactggaaactatatattgaaagagcatatcatggtatctagagataccaactcagaatgaccaacaatcttctagtaaaattaactatatttgaagaaaaaaaatcttatgaacatttaggcaaaaagagcatatgatttataaaggaaaggaaattagattataatctgactttgacagcaacacctatgccaaaagaaaatggaataaggtatttagttactcaaggaaaaactgtgagtcaataattttatttatttatttatttagagacaggattggtctcactctgttaaccaggctgtagtacagtggcacgatcacggctcaatgcagccttgatcttccaggtccaagaggtcctcccacctcaggctcccaagcagctgggaccacaggcactcaccaccacacccagctaattttttatttttttgtagacacggggtttcaccatgttgcccaggctggtcttgaactcctgggctcaacccgtccacctgcctcggcctcccaaattgctggaattacaggtgtgaggcactgtccctgcccaatcattttatattcagagaaactcactttcaagtaaaaagatcacagataacttattatcagtatacaagaactcagagaatattgttcccactccttcttaaggaatccacccaagaacaagcttcggatgatccaaatgcctggtgcaagattgacacaatgattgatggagagtacttcaatgtagttactcacagaaccaagggaggagagactgctgaatgtaacagctatgtggtcttgaaaatacagaatacatcatttttaaatggagggataatagacacagcatgggttttaaaaagttgtttagtttttcaactaaaagtcgtttagttttttaacgattttcagtatcatggtatggtggtggtattagtattttcactctgagactattacatgtataacgtgaaaagacaaatgagatagatcaggatgttctaattcttcttctgtatccctaagaccctgcattctctgtgtgaaagaaaggagatggagatgtaattaatattaaagaggttaggtaaatacaggcatacctcattttattgcacttcacagatattgtggtggtgtttttgttttgtttttttttttaaacaaattgaagctttttatcaaccctaaggcaagtctatctgcaccatttttccaacagcgtatgttcactgtctctgtgtcacattttggcaattcttgcaggatttcaaacttttttgttattactgtatctgttacagtgatcagtaatgtctgatgttactactgtaattgtttcggggcactatgaactgcactcatataagacagtgaacttcatcgataaacgctgtgtgttttctcattgctccaccacctgctcttcctgtattcctgtctcttcctctccttgggcctccctattatctgagacataacaacattgaaattaggccaattaataaccctaaatgacctttaagtgtttgggtgaaaggaagagttgcacatttctcactttaaataaaaaattagaaatgattaagcttagtgaggaagccatgttgaaagctgaaacaggccaaaagctaagcgcctcttaagccagttagccaagttgtgaatgcaaaagaaaagttcaggaaattaaaagtgctactccagtgaacacatgaatgataaaaaagcaaaaacagccttgttttagtggtctggatagaaatacaaaccagccacaagattcccttaagccaaagcctaatccagagcaaagtcctaactctcttcaattccatggaggctgacagaggtgaagaagctgcagaagaaaagttggaaactagcagaggttagttcatgaggttaacgaaagacgccatctccattatataaaagtacaagggaaagcagcaagtgctgatggagaagctgcagcaagttatccggaaggtctggataagatcattgatgaaggtggctacactaaacaacacattttcagtgtagatgaaacagccttttactgaaagaagatgccatctagaactttcatggctagagaggagaagtcaatgcctggcttcaaagcttcaaaagatgagctgcctgtcttgttagaggctcacgcagctggtgactttaagttgacgccaatgctcatttaccgcaccaaaaatcctagggcccttaagaattatgctaaatcattaggagatatacctaatgctaaatgatgagttaatgggtgcagcacaccagcatggcacatgtatacatatgtaactaacctgcacattgtgcacatgtaccctaaaacttaaagtataataataataaaataaaaaataaataaataaataattatgctaaatctactctatgttctagaaatggaaaaacaaagcatgaatgacagcacatctgtttactgcatggtttactgaatattttaagcccaccattgagaaccaccgatcaggaaaaaaaaagattccttacaaaatattactgctcaccaacaatgcaccttatcacccaagacctctgatgaaaatgtacaaggagattaacgttgttttcacctgctaacatcaattctgcagcccttggaacaaggaatcattttgactttcaaatcttattatttaagaaatacatttcataaggctacagctaccactgatagtgattcccctgatggatctgggcaaagtgaattaaaaaccttctgggctgggcacggtggctcacacctttgggaggccaaggcgggcggatcgcgagatcaggagatggagaccatcctggctaacatggtgaaactccatctctattaaaaatacaaaaaattagccgggcatggtggcacatgactgtagtcccagctactcggagggctgaggcaggagaatcgcttgaacccaggaggcggaggttgcagtgagccgagatcgtaccactgcgctccagcctgggcgacagagcgagactccgtctcaatttaaaaaaaaaaaaaaaaaaaaccttctggaaaggattcaccattttaggtgacattaagaaaattcatgattcgtggaaggagttctaaatatcaacatttgaggagttcaagactttggtggaagaagtaactgtagatatggtggaaatagagaactagagaataaaaagtggagcctcaagatgtgagtgaattgctgcaatctcatgataaaacttgaacagatgaggagttgttccttatggataagcaaagaaaatggtctcttgagatggaatgtactcctggtaacgacgctgtgaacactgttgaaatgacaacaaaacatttagaatattacttacataaacttagttgataaggcagcaaaagggtttgagaggactgactccaattttgaaagaagttctatggcaggtaaaatgctatcaaacagcatcacatgctacagagaaagcttttgtgagaggccaagtcaatcagtatgacaaactttattgtcgtggtctcatccagcccaaccttcagcaaccaccaccctcatcagtcagcagccatcaacactgaggggaaaccctccacagcaaaaagattacactctctttggtaatacagtatttttaaatgtatatatatatatacataatgctactgcatacttaatagatataattttcccttaaaataaaccaggacttccgaaagaaatggcttgggcagggatgtccaaagtgagcctgaaacacctcaacatatcacatagcaaggaatctatctatcaaagactcaaagactatgatggtcatttcaaaaggactcagaaatcttgaagaggtttcaatgggaaaaggcgagaaagtcggctttgagataagaattataatggattgaacccatcaaatatgttcaaatccatgacttcaaaatgaaaggaacggggaaaaaaaaaccctaatttgtcaccttctgaggatgacagagaatcaattcattatcttgagaactaggtaaataaaaggaaagaatcaagcacttatcctgctttcctaaatgaactatactatttggtaactaaatagtaagtaagtgaggacattatcttataaaattttaccagctaaaaattgaaaacaaaatgacagaatttactgtcaccatattgcaacccctagtgaatgactggatataggcacagaatacacaaatggaaaaaggatgaaacccagacactgtgacatcatgtgcttcctagcgtatggaagaacataatgcgaacaatatagtctagccaaaaggacagaacctgaatctgaccgcacttcaggttccagctgccaatttgcaggaaattcagaggacagaggagcaagctgaactgcaacatgagggtacaatcagcaaaatccagatggttgaaaagcacaggtcaaaggtcagggcttccgaatagataaattgtagggaaaagaaaatgatgaaggaggaatctttagattaagacttaaaagactacatatcaagtttttaaaactggcaagaccaatctagagtctagaggtatacacctgagtgattaccactacaaagaaaggcaaggaaatgagtattacaaaagtcaggagagtggttactttgagagggaggagggatgttgtgactgggatggggcacatggagaagtctgaggaggttgggaaagttctactttttgacatggaaggtggtttcatggtgttcgctatgtcataaatcacttaactccctgagtctgctttttcacttaactatttggtgtgtttttctgttttataatacacactattttttttaaaaggataacgtgaccagtaatgctagagacagggagagccagagatggatcaaacctgcttcttcaaaagaggttcagactctccgtttaagattctggcatcagagttaggcgcagtggctcgtgcctgtaatcccagcactttgggaggctgaggcggggggatcacttgaggtcaggagttcgagaccagcctggccaacatgatgaaactccgtttctactaaaaacataaaaattagccaggcatggtggcgcagggctgtaatcccagctactcgggaggctgaggcaggagaatcacttgaacctgggaggtagaggttgcagtgagctgagatcacgccattatactccaacctgggtgacaaagtgagactccatcccaaaaaaaaaaaaaaaaattctggcatcaggtctaaacgatattcctttctcttaacaaaatgcgtccatagccattaaaatgatcaatttagcaaggcacattaaacagaacaattccctttcacagcagcgtatttccttaatatgctttagctgccaaaattatgagatcacaggaggagacattcccagccaaaagcccatgaggaaaagcgggtaaatgtttaaatgacacagttcaggaattaatttgtatttatgtaaaataattttaattaataaagctttccaaacaatgtttcagtccacagccaatagagaggaaaataaaagtagcatggttctccaatgctgacacgtgcgagactacctgacatgtgcgagactgcttacaaattaattagagaccatcttcccttatttcaggggcagcaagtactcccatttgtgtttatgcctaaccttttcagcctactttgggctagcattaaaaactgatccaaaccaataatcacattttaaagttaaaaatcataactaaggacaagaaatcatattaaaaagtattccaaagccttgtttcacacataacctacttttggaaactaaaggagggaatgtaaagtacttaattcacctttcacgttttttgtttgtatatctttatgaaaaggactttcttaaccagggtccactggacagaacacagttctgccattagcttggaaacaagcaattgcaaaaactcttttaccacctgtgacatatcccattttatctgcataactttggcatcttacgtcactgtcttgtacagtctgtgccagcagtttcagttttttctctccttttggggcgaggggaaattcatgtggtcaaatggcattacagaattactgaaaagtcactttactttccctaaaatcttccaacagagaacatgtcaactgtcaataagcacatacacaaacacactcacagaaaagactgtaatcccagcactttgggaggccgaggcaggcggatcacttgaggtcaggagttcgagaccagcctggccaacatggtgaaacctcgtctctattaaaaatacaaaaattagccaggtgtggtagcagatgcctgtaatcccaattactcgggaggctgaggcaggagaatcacttgaacccgggaggcggaggttacagtgagccgagatcatgccactgcactccagcctgggtgacagagcaagactccatctcaaaaaaaaaaaagaaaaagaaagacacggcagacactgcagtacaacctttttgatttaagggcttcttgaaaggattatctgtaattaaacttaaacgtagtaaattattgtaaaatccaacagacagtcaaaactgctataacgttctgcttttcaagcctctatacatacacacacacccacacacatgcttttgaaagcagtaggtgagtctcactggcctgtgtgcacacaacaccctgggagcttaccatgaccgtgcagtcctctgaaccgctggcaatgacctgatcgttatgtgggcaccagtctatgtccagcactggtcctgtgtggccacatactgtagggtaagatttgtcaattcgaccagtctgaaagaagagagaaacaaacctattatgtaatatcaacaccacagacgttatacattttctcaggcccatttctcatttattacctccacccaaaactctcaattttctagatatgacatcgtatagtcaatatcaactttcacttctagaaaaagccactaccaaggacatgcgatcaaattacaagaatccaaatccctagaaccaaaaagatgtaaccaactgcactagcagacatagcaaaagagaatatgaaagtctttttgccaaaatacaattctaaatagccaaattgtaaattaaaaggatgttccatggcttaaaaaaaaaaaaaaaaaaaccctaaaccttggtattattcaaaatgttaatacaataagacaatatcctccaatatataaattaccagttctggaaatgaatggcactattaaaatgtaaaggccgggcgcggtggctcacgcctataatcccagcactttgggaggctgaggcaggtggatcatgaggtcaggagatcctggccaacaaggtgaaaccccacctctactaaaaatacaaaaattagctggtcgtggtggtgtgcgcctgtagtcccagctacttgggaggctgaggcaggagtatcgcttgaacccggtaggcagaggttgcagtgagccgagatcgtgccactacactccagcctggcgacagagagagactctgtctcaaaaaaaaaaaaaaaaaaaagaaacaagaaaaaagaaaaaaaaaaagaaatttaaaaagttaaaaaaaaaaaaaaaagaaaagctttagctatcattagggcctaaagagcctactacattgtaatgtctcagtctctctgctatcctcaatcaacagaaatgccagccagacaatctagttaacaccaacttagacctcacccattagccagttccacatctgattaagaataaaatgcttaatgttggtcataaatagctaccacaatttgctcatgtcacacatttgaatctagcaaaccaaccagggttatcagaccaattttgtgtcaactaagacaactgctattgttaacaatgggtatatgaaagtggtttcctttttaaaatagcttaatgccagtccacgctgaagctgtgtatgctttaagagcaggtgcacagaaaggaaccactgcaatgtatggcttaatctattttttgttgtttttgctcttatatggcaaatcatcccaacactggagcaggcttcttagcaatttttcaagaacagaaatttctatgatttctccaatttgacttgactgtgcaaatctccaggaaagcagaacgttaacgtgtaaagaccacaggctctggaataagacaggtaagggttcaaatccaggctctactgattaaacaggtgactttagacaagtcatgtaatctctctaagcttcacctcattcgtcatctgtaaaatagttaacaatgatacttattaactcccacaattaccgtaaggattaaatgagagaacacttttagataaatcacaattcagtattacaattatctgtaaaataagtaaaaaaattaaccacagtatctggaataaaatatccaataaaagctgtcacattattagttcttctagtacaataatttactccatcattaagaattaacaaatatgtgttgtgaacttttatggaccagacattgtgctgagtgctggagatacagacgtgaacaaggcagtcctgtcctggctaaatgtggagcccagtgagaggagagagacatttaaacagccaattatggtgccacataggaacagagaaggaagacattcaagcaggtttgtggggtcacagtctctggagaggttttcttctgggaaaggtaagttctaagttgaggcctgaatatggccctgtttacagacctaaggcctaggtttcttcacattcctccactttcccttgcaacccagtttggatcttccaaaacgcatcaccaaaaaaggacttcaaaaaaggaaattccaatgaacaccatatcatatagaatctgggtgtcacaggaaggagccacacagttcatttacaggcagcgaagtataaatggttgagaaccagactgcccagagtgtagtcatggttctgccatcttctagctgtgaagtcctagccaaattactccatccctcaacctcggttcctcatctataaaactagaatgtttaacagtttattccttaagagctgatgtgaggactaaatgagacaatcaaggtaaagaacttggttctgccccagcacttgaagtactcaataaacattacccgaaatttaacaaatgctggaatctaccacatttctgatggtgtctctccttaaagaacgaccagctactaggtctaagccacgtggttttgcttatcttattgcattctcacaaaaatcatgcaggtaagatggagatttcacttgcatccttgagttactaccccaggtaatattgttgcttaagctgatggtactgggatcacaggcattcatcctattttacataattattaaactatagatacagtaactcttttgaatgtgtgctctctttctccttcctttctttctctctctctcttgttcttgtctcacgttgcctaggctggaatgctgtggccattcacaggcacaatcatagctcactcctggcctcaagagatcctcctgcctcagcctcctacatagctggaactataggtgtgtgccaccatgcgtggcttgaatgtgtgatatttcataacttaaaacatcctaaggctggaaggccagaatgaagtttgacacacatttaaatagacaaaccaaaaggagagaattaaaagaatggaacagaggcaaaaattaaagagataatgtctgagaatttttcaggttcagttaaatgcataagtctttagatttaagatgcacaaatcccacctccggcagtataagtgaaaacaaattcttatctattcatatcctagtgcaatttagaacacctaaaacaaagagaagatcccagaagcaacaacagagaaaggacagattacctactgacagagtaattagactgattgtgagcagatttctcagaagcaatcagagaaacaaaaaaatggaaaacatcttggaaatgctaagaaaaaccaccacccttgtattccatacccagaaaaactatcattcaagaatgatgacaagaaaaaagcaaacaaaaggcactgcagacaaaaagagacagaatttaccatgggtaaacccttgttcaaaaaattaaattcttagatttgtctcaaagaattgctatattaattttgaagaattaagtttaaggactcatttcaggaaaagaaagtaaagtagaaaggtatagcaaaacaacagtgagcaaataaataaataaagcaaatacaaacaggtactatgtaaaacagtactaataataccaacttggagtacagattttaaaaagacagaaacaaaacattagacaacaataccatttaaggtaaaaggcatatgatcagacttaaaaattgactaattttagactttaaataaagatatccaaatgcagagtaaatactaaaaggaaagagagagaatgtataatttctgggggtgggtgggggtggaggtgtactacaatagctagaatttaaaaactggctcaatccaatagaaagagaaaataaaaagaaaaaaaggaccaaagaaagtatgaatgcaactcatgaaaagcagagacaaattttttaagaaaaaaaagcatgaaaactagaaagcacaaagatggtggaaataaaaccaactataaatcatgatttgtagtaaatgcaagattaagctcactagataagacaaggcctctcagattagattatatccagctacacatattttaaaaaaataatggcaccaaaaggcaaataaaggagggcggcatattaaaaagtatacctggtagttaataccagaacaaacagactttaaggtgaaatgcactattagcgattaatgtcactatctgacatctaaagaaacaattcactggaaagttatattgccactataaactgtaattcatctaaccatataatttcaaaataattaaggcaaacgttgacagaacttgaagaaaatgacaaagtcataatcgtaagagatgtcaacaaagatttaagaaattaaacagacaaaattaatatgaatacagaagattttataaaaattaacaactttgatctaatgaatatatataaccttgtacctaacatttaaaaatacacttttttcaaacatacattaaacattaatttgttttaaattatcaattaggagaccacaaagcaaatctcaaaaaataccaaggagtcaatagcaggtagagcatcttctgagtataatgcaatacaattaaaaattaatagaaaaataaaccaaaaatctccagtacatttgaaaatattttaatttactaaataattgttttttaaaaatcataatggataacagaatgaaagttaaaactgagcaatacacaacatatccaaatgtgcaacatacaactaaaacagatcttagtgaaaaatggacagtcttaaatgcatatagtagaaaagactgaaaattaatgcattgagttgctaccttgagaagttagaaaatgaacagagtacatccaaagaatgtaaaattattagaaaagatgccaggtacagtggctcatgcctgtaatcccagcattttgggaggccaaggcaggcagatcatgaggttaggagttcgggaccagcctggccaacatagtgaaaccccgtctctgctaaaaatacaaaaacttagccaggcatggtggtgggtgcctgtaattccagctactcaggaggctgaggcaggagaagtgcttgaacctgagaggcagaggttgcagtgagctgagatcgcaccattgcactccagtccgggcaacagtgcaagactctgtctcaaaaaaaaaaaaaaagaggaaaaaaagaagtcagtggaaaaaaaataaataacaaaatcaactaaactggatagatcaggaaaagagataaggcacaaatgaataccaataattttaaaagggacataacttacaaataaagtagaaatttacagagtatgaaaacactaggaataacatttgacaatatatataaaattgaataatctagatgaaatacacaatctcacagaagtaaaagtaacatcaaaagattttcaagaataaataaatgtaaattagatccataaccataaaagatcagtagtataactctacccatcaccacctcccaatcaatcaatcaatcagcaaataccaaaaaacactaggcccagatggttttacaggtgagtgtcaccaaatattcaaggaagagatcatttcaaacaaagctttccagagaacagaaaaaagaaaagtgccactgaattcatcatataaggaatgtaacaccttgatacaaaggacagtataagggagaaaaattgaagcctatatgacttataaatactgatgcaaagctcctcacaaacagcaacaaaagcaaaccaaattcagcagtgtgagttgttctttaaaaatgtaaatgaacagacaagttacaaagtgcaagaagaggtatgcaacatacatacctaacaaaatcaacaaccaaacagaacgatgggcaaattacacaagcagagaactcacagcgaagaaaatctgaagacgcaatagatgtgtgaaaagatacttcaatctcactgataattagagaactgcaaattaaaacaacatggtcacattttatactcatcaaaactggtgaaaatgtaaaagtataaatataagtgctgacaaggatgtcaggaaagaggaactcataaactgcttacagaacaccttgttacaattcctttcaagagcaatttggtaacaggtagaggtgaggaagtccagcccagcaatgccacttctaggtggtctgggtgagagagatgctcccatattttgtacaagaggaatatttattgccgcattgttggaaatagtggcaaaagcagaagcaatttcactgtccttcagtatgggaatacatatttacataaaagtttaaggcacgcgaaataaaagtacatgttacagataaacatatatgtaataaaaatatgatacatatttgaagaaaagattacctctggggaaggagaaaataaataagaatggtattctacctgtatctgttatgctttattacttttttcaaaaaggggagatatgaaacaaatatggcaaaatattaacatctgtttaatcttgtgagtacatgtgtgtcctattattttgatacatcttattttgaaaaaaagaatttaaaatataataaagttaagaaatacaccaatgcattattattaaatttgcattaaaatttttttttactcccaaggaaaaaagcttttctacctgaattgttttgttttacatcagggtctttgcattcctaggctctgcccaggaaaccacatttggcatccttgatggccaactatagtactgagctctgaacttccaagaacaccaaatgattttttccaatctgggctaagaagcgcttttattcaaacacaaagcaattttgaggggaatctggaagtactagcactagttgttcttaattacatactaagaagcttcttactaaatgacttcttttttgaagttaaaattaaataaccctggctaaaagttaatagctattcaccagtattcttcagtcaagatatctgagaataataataagcattactgccattcccagctcagccccaataaatccacagcctgaaagtactagagctcaacattttctctggaacctgaatgtcactgaaagagcaactgccagctatttctgtcctttctatcaaaacaaataataacaatggctaacactttttaagtacttaaattacaagctaggaactgtctgaagaccttgataactttgtcctcatgacaacctttaagatgtgggaatcttatcaccctattttccaaataaagaaactgaggcacagagaaagtcaagaagcaaagatctaaaatatcactgaccaaccatactagatttggatagggaaagaaaatttccactatgccatgggttgtaaaaaaaaggcacacaagtaatgttaaaaattattggcaattggccatcagaaacacagttaataaaaaatgatattctacaagcagctgcttcctctggttgtgatgtcatcataaatccttaaataaaacagagaaagtagtattctactgtagcacaagagaaaagcaattgactaaatatctgacagtgataaaagaacaaaaatgtgaagacagtatgggggtagatggcattttaaaggtacactgattatttggcatgctggatgttcacaaacacacagtcaagtatcagctatcctgctttcaagggcttacacctctaagtatcttcttactcataatgaaatcaaaacaaaagcacaacaacatatttcaccaaatcagcatacgttattaaaaatacaaagctgggcacttacaaactgctgagggctccagttcatggagattaaaggaaaccatactaataacggccttatatggtaaagatgaggaaacatcattctgaaagacattttgcactaggatctaataagaacacaattctcattcgtctgcacgacacatactgatttatcatgtagtgaacaaaccaaagaatccatgtataattagctagattgtgaggggccactcagaaagacatccaccacatgtcatggtgacaacacagtttacctgaacctctaagcagcaaatttaaatgaatgcagaggctgaaaggaagatgtacaagaattaaagccagcttttagatatctttttaaactaaaaaatgaattatttaagaaactcccaccaatcttctaaagcttagagatagaaaaacttcactttactaacagatcagtccactatttcactagggataaatcacctctgttgcttaatctagaatattactacttttctggcatgaaattgaagtagtttagctgaaaatgtaatagccattagactccttgctttaaataaattttgattcattgattacttactagtcccaatcacatgccataggatagcttttgttatacctttctagctaaaactccaaatgattgggattactagcatgtcaacccaacaggtggcaaaaatggccagcaccaagtttcccaaaggctctgctccagagccagttcataaactcgtgggacattggtgaaataggtcaggacactggcctacagacattattatctgaaagatccagtacagcctgcccagagccaagcaacatgagccgaaaggaaaattcagcttccaaagcatgtatacagctggcacaagggagaggtgtaatggcacaatttccacgtggctggccagagctaagggtgatgtcttatgagcatgttccagccagcaaccttcaccgtggcagaaaccgtcccagatacaagcactatcatttgctttggggaaaacacttaaaaatcttgaagtagctacaacacagccgagttcctggagactgatacttcaactaaacccacagagttaggcaacatttcctccaatgggcattttgcggggagaaagtgaatgaaaatcaaaatgtaagcatcagtaaaaatataactttatcaaattgctataaaaggaaagttcaataacttaaatgacttagcaaaaaacattcctctttaggcacactaaattcaacataaatcttaagaaatccggcgaaaccctgtccctacaaatataaaaattagtcaggtgtagtggtgcgcacctgtagtcccagctacttgggaggctgaggtgggaggatcacctgagcccaggaggtcaaggctgcagtgaactatgatcgcgccactgcactccagcctgggtgacagagtaagaccctgtttcaaaaaaataataataaggccaggtgcagtggctcacgcctgtaatctcagcactttgggaggctgaggcgggcggatcacttgaggtcaggagttcgagaccagcctggccaacatgatgaaactccatctttacgaaaattacaaaaattagctgcgcttgatggtgtgtgcctatagtcccagctactcaggaggctgaggcacgagaatcgcttgaacctgggaggcagaggtttcagtgagccaagatcgcgccagtgtactccagcctgggtgacagcgagactctgtctcaataataataataacaatttaattaaaattaaaaaaagaaaaaagaagaaatgatattgcttagctgtaagggcacttcctatcaatcttactggaaaatcacaacagcttccacttattaacaatgtatcccctctgaccctttttttttttttgagacggagtctcactctgtcacccaggctggagtgcagtggtgcaatctcagctcactgcatgcaacctccacctcccaggtacaggcgattctcccgcctcagcctcctgagtagctgggattacaggcacacgccaccacgtccagctaatttttgtattttttttcactatgttgaccaggctggtctcaaactcctgacctcaggtgatctgcccacctcagcctcccaaagtgctgagattacaggtgtgagccaccgtgcccagcccagtatatcttatttatcgatctcacatctccttctaaaaaggaatccacatttaagaagtagactcatcctatatattgagggcagtactgagtacaataaaaaaaactgttaatgtacacaaacatgtacagaaaatttctgacagacacgtctcaataaagttctgtgctggggtgtgtttttaaagcagctagtggtgtattacacatgtaccgcagccatgttcaccttcccaaactctcgaaattcaacattgggaattttgcttccaatatgtcctacatattacaaaagatcattcagaatgactgtttcttcatgtaagaatgattcctcacataattatttctgacccacatattggtttgtggttgaagacactaccaattggtgttaaaatggatcaatctaagctgggcacggtggctcacacctgtaatcccagcactttgagaggccgaggcaggtggatcatctgaggtcaggagttcaagaccagcctggccaacacggtgaaacttcatctctactaaaaatacaggccgggcacggtggctcacacttgtaatcccagcactttgggaaaccaaggcaggcagataggtcaggagttcgagaccagcctggccaaaatggtgaaatctcgtctctactaaaaatacaaaaattagcccgttgtggtggcacatgcctgtaatcccggctactcgggagggctgaggcaggagaattgcttgagcctgggagacggaggttgcagtgagctgagagcgtaccactacactccagcctgggcgacagaatgagactctgtctcagaaaaaaaaaaaaaaaaaattagccgggcatggtgttgggcacctgtaatcccagctacttgggaggctgaggtgggagaatcacttgaacccggaaggcggaggttgcagtgagctgagatcgcaccactgcactccagcctgggcaacagagcgagactccatctctgaaaaaacaaaaaaagatggatcaatctgataatcactggttcctgcaagaaaggaaatgtaacattatgttaaagtcgcacaacgctttacccagcaggcctactctttctcataactaatgtatgttttcacaaagtaataaattcccatggtgataaaaagtgacacattcattcgagtgataagtcaaatcaaatattcccctttaagaagctcaaggtatcccacacacaatttctttcaagtttgcattctggagtgtatcatataaacccacaccttcctagggtgctggattcagactgctttctacacggtttcccttatctaatccaactcaggcagctgtctcacttccagtacttttccatctcctgatctgcagtcctctatgcctattatccagactggttacaccacccgaagatgtaagggcctaagagcccccaccccatcctggggaaggcaaacaaagatactttacatgacctgactcaaagaacagttaaaagatttccacattgttcaaacccctacctaatattcatctaagttttcattttaggaaaaaatgagtatcaaaatcactttatgtgcccaaatttcaatcataacttatttttggctttgggtgatacatactgagaattcttcaactcagcaaggagaatgttaagtcacacatgtgctcagaagtagaggaaaagttttcagcccaagcataagggctccattcacactgtgcagagttcaaaggagtcaaaagcgtatctattgaagtgggttttccatttttttcaacttcctttttcttatgacagtattatttatgtggatacatgttttgtttgaatttcttaagcccctgctgctccacggggaggagctagagtgattgtggtcatgggacaaggggacagcggcatggaaaacagagactcagcagcagaccaaaaagacgggtgcacacaatatatgacttgtgcacaggctggtccctgagagtgacagctcatggcccaggaataaaacattctgaggaggctttactttaagggaaccagaaataccatccttgaggtaaaaggaggtgctctggaataaaccctacagattgagttaccctgtaaggtaaggtaagctagaaacaaaagctgctggggagagggagtatgggcctacagagacttcacctgcctgtgagtaaaaaacagcagtctttttggacagaagtgaaaatgccaagcaaataatttttgcatcacagatcctctctaaaaactgggtttaatactgaatagaccatattttaaaatcaattaagaacttgagggaagttattgtaaaactacaaacattttattatcagaaagcaaaaacacggaaaagttaacatttccttactcaaccttgcccaaatatgcgatagcaaccagagtagctgtatttcctaacttcctgacttaaagaatttataaagtgaaaacctaatgctttctgctcattattgcagacaagtaattccatatgatgcttctgggctgagaacaaataaaaacttggaacccaagatgaggtagaatctagttaaaataaaattgagctagaaagcaaaagctgaaaagcagaagaactacagatgtaaatgcaatatggaaaattaaagcattcaatatcaaatcagaaaatagagaaactggttgtctaagccctcgtagtaagcaaatgacattggagattgatctactgaaaccctctgtgaacgctgaagagctccagggctaacccttcccattgcagctctgcattggtttaatccacaggtctcagaatgaaaatccaccctccttggatggtggagatgataaatagaaaaatattacaactttttttggggggtgggaggggctaatgccttgggctccatggctgagtcagttccacacaagcaagaggactgcagtatagactcaattcagtcagccagaaatgaaacccaagtcaccgttcctccaagaaagcagacatgtgtcccatcacatgccctctcagctcattcttccccagactcaactcaggtcccacccctaatgggcgaagatattcaacttggcaggagcagatgatttgctacatgtggttataaggtggcttctgggcaaaaccgtgactccagaaatgtgttcatgacaccttgagtttatttcagagtaatgtgtgttcagatacctttctttaccggagatacagcagctttcccagactggggttaccatgtttacacactgagggcttctgctggcagcaattgtcagcctgcttagcacagactggcacgctccacaaacccagtaaagagttaaacgttctttgcacttgactcagtggcttctcttcaccacacactcccagatcccaccattctctgagccacccgtgcagccaatcaaagcaaaggaaggaaattatcctggccggctgacagccacagcgctctgatggccatatatggtaaaaaccactgtcagagccctgtcaggcctgcgggccggctgctgtggacatatcagtgaactgcagcagcaggagaagctggccaaggaaacgcacaaaggctgcctgctcatctccaggggagggggtggggtggaaaccatcatctgccagggcacacattcagtgagtcacagccactcactgtcatcaaaaatagccccggggtacattgggaagttccttctgccaggactttgtgctccattgttaactgggggtgagcagggtgcccaccccacccctcccagcaaaactgtggataacacagtcactaggagaaaatgaaaaggcccttctgtggcacttcatgtggtaatgaggccaggccgtgctcgtgtggctggcagctcgtgacataatttggaagtcattgttctgcacctggtgccctccccctgcatcctccacccctcccagtcctgtcccccagcttttcacggcccatacacttggcagttgaaggtgctccaggcatcagacaatctatttcaggaggcagtgaatgggcatcccacgacatgtcaggacactggctggctctgaacaaaatcctctgcccctaacaccaaagctaccaagtgccaaatgtccacatctgtacaaagggctaccggcactgccactgttgtctaaaacagagtaccacaatgtgtagaaatggaaattgcctgtcagcaatgcacagtaaggcagacatgcagccaatgcaaatccagcaggtgctggcaaagactgtggatcacacagaaaagcactgtcaggagactgccattccctctcaagtagcccatgaaagaaggcacttatcagcacggcgcctggcacttaaaggaagccctcaacaaatgtgaactgctgcgatttcatcactgtcactgtgtcctcacaaggcatggtatagaccaagtactttccaaacctaagacaattctctgagctgacagaatgaaagccctgtcaagttactgtttttgttattaaactctctaatcccagagaaagaatgcaaaggattcagtgtccattagaccacagctttttttttttttttttttttgagacagagtcttgctctgtcgcccaggctggagtgcaatggtgctatctcagctcactgcaacctctgcctcctgtgttcaagccattctcctgtctcagcctcccgattagctgcgataacaggcgtgtgccaccatgcccagctaatttttgtatttttagtagagacagggtttcaccatgttggccaggctggtctcaaactgctgacctcaggtgatccacctgcctcggcctcccaaagcgctggaattacaagcttgagccaccgcgcccggctaaaccacagattctatatcctcccccctaaagaaaaattcgttcacactcagtagaaaaaaaattaataaaaatatacatgtacaaatcaaataaggactcagcaacctaagttctaattcacaaacaacctcacggtcttggacaaccactcaatttggtttcaatttctacaactgtagaacagaggaatgatcccaccctaccaagtgaaaaaacagagacactgttcatgaaggggactatccacgtacgatctgctgacattctgcagtctcatttccatcaacgtgacagaagtcactgctttttcctaaagatgatacaaacgaaagacgccatgttgatctagttaaaacaatgattctaaaatataaaacagtgcttattctagttcttttccccataacaatcaaggaaaataccaattttgccaaattcacactgaaagtgaaagaaagggtcaagaaatgtaggattttctaccaaaaagctatccttcagcttcttttgactcataatgttagttcacactatgcataaatgatttgtttatcttccaatcaaacattctatttctgcaatactacaaaaatccacctaaactagacatcctggagtctgaaggaggaatgtgcctaccacctacttctttgccctcctagggacagagcccctctactaacttaacagtttaaaagttgggttggctcctcttctgtttcatctttagctcctacgcagaggaaaaaaaaaaacctgaattcaaaccgaaccttctctgtgatgtcttccttaccttctaagcctagggtgaaactatctctcacaccccagtgctaaagcacttcatgcacaaagcacccccctggagagatcaagcacagttgttgaagcttcttaaaagcaagaacctagccgggtgtggtggctcacgcctgtaatcccactttgggagggcaaggcaagaggatcaggagttcgagaccagcctggccaacacagtgaaactctgtctctactaaaaatataaaaattagccgggcatgatggtacacacccgtagtcccagctactcacgaggctgaggcaggagaagtgcttgaacctgggaggtggaggctgcagtgagtcaagatcgcaccactgcactctagcctggggaacagagcaagactgtctcaaaaaaaaaaaaaaaaaaaaaaaaagcaagaacccaccacaggtcgctgcacatgcaggcactaaggaatgaatatgtgaatgaatgaatgtgatttttctaaagtactgtgttaaatttcacaaacatttaagcaatagttagctctttatatgtactctggtaatattactgataatatttttcaaaatctcaatatgtaataagttcattgtaaaaaaatatttttaagtgcaggtaattataaagaagaaaataaaacatcacttttagtcccatcaatgttaacattgcacattatttcctaaaaactaataacacaattgaagttaagtacgagataatgactatgatcttataacacattttttaggttatatgaaggtaccatggaatacaggataacaaaatcttgccatatagctttctcttgctattgaaaggaatccctcaattattcacttaggacttaagaatgtttatatgtatatagatattatatttctacgtagatttttttcttaaaggctaggtggaaatatagtgttcaaaactaccagaaagccttttaagtcactctgaattactcatatatgaattgtgtgaactaacattatgagtcacgtaatacagtctaagaatatatgtattagttatcaactgctgattaacaagttatcctaaaattcagctgattaaaacaataaacatttattactcacacagttgctaaggatcaggaattcaaaaacagcttatctgggtggctctggcccagggtttttcacgagatagtgtcagccagggctgcagtcacctgatggctttactagggctgcaggatctactttcaagatggctcatcacatggctggttgagctggtgctggcagtcatcaggaggtcctatggaccttgccacagagctgctggagtatcctcacaacatggcagctccaaaagagacaaagtagcagccagtgggcttttatgacctagtctcagaattcacactccatcaattccaccataccctatggttacacaggctagccctattcagtgttggaggccacctaccacaatatagtaaggcaagtttttggagaacctgcacaaaaggctaccatatacatagccacccagtttgcatcctctatccaagtgagtcaagagatcaagagcatataattctaaccattccctccgttaagtgaataataattttaataatgtgataacgcaggctgtggtaccagtggtatgaagaagcaactaagagaacccaatggatgagttcctctgtttcagtaaataatcaaaggcaacatctgagctggataatgaacaggaagaaaagaccaccaagtatcatcattagtggaatactgactgaaatgaatcaagatctcttcctcaaccaacatgacagaaacattccaaagctgccttcatcaacctaggttctataagaaattaaagtcctaatgctctaatatatgctattataggcaatgagctcttaatcctatgcatctagaagactggctatgtatcacccttgggagaactaaaaaaaaaaaaaaaaaaaaaaaacagtctttcaaatgattttctgtagagctaaattctttcataaaaccctacatgaaaaactgcaaaatgagttgaaaaattgttcacagacataaataaagcaagatcccaaatattcccacacacagctcctaaaataaatgggagaaacacagttgtgtataagaaagtaccacacagctacaacaaaggagcccatgggagagaagaagagatcatgacccaaaaagctaacagagacctggccatacccatcctatcctggccagagcagcattcttgtcccaggtagtttctgtgagggtgaaatcagctatcattccaattcaccaaagttgcttcacagtatttcacaatactcaaggaaggaagggagaaagaaagcaacttgggaagacaggagccatctagttcgcatcctccagccaagagaatgtcaagagatcaagagcatataattcttaccgattcctccccctcttacttgtttaaggcaggatttacaggcttgttgtgatatgaagtgtgtcggggggagggaggggacgggggggttgtatgtgtatctatccagaaacactggtgtgtatgagccctccatggttcacaatagggagggaatgtctcagttctatctacgtcacgagtgtggctactccacaaaggaaaggcttattcatgccaacgtggtagattacacagagggctgaaaacctgtgtgctcttgagacaaggcagcttgtgcagttgtggcaagaaaaaaaagtattcctcatagccaaaaccacaaagccaacttatgttcagcaagactgctattattcatcctctgaaggactaaagaataagtaaatgcactaagccacaccttgaaaagtcatggcagagtggcaagccacagcttgatggaagcattacaaaagagagtgggaatcacgtgtgctaatctaaatcaacccacctcaggactgaggactttctatattcctccggcagtgacctcttcaaaaatcccactttccctaataaaaccttcctaacaaacacctcataaaccatatgcttaaaataagcatacattcattcttaagtgtgctgcttgctgcatatgtgtgtgtctttgtatatgcatgtgctttgatgtatttatccctattactcttttcacttcagattttaagtcctggaagacagaaaccatgtctaacttattttacattctcccagaatctaaccacaagcctcatgaggttgcaataagaagccttatttactgctgacactaaatagctttcaaaagaaattcatggaaaaccatgttttcaaatgggagcctttctgaaagggtcataatccaccttaattccaacgtgtacatattcagtattattatgtacagagtcccaaacgcatcaccaaaactaacctgcctgtctataaccagaaacaaaaaagggaaaacattctcagaagcccatgagataattattaaaagccatacccatcttttaaggttcgtgtttaaaatcatgccaggctgctatcaacatgtattggagcctaacacacatctaaacatcatttcttgctatcttgatttcaaacataacttcatattataattgggaatttagtttttctttgcctttaaaccaaagcaacacctcatgataaaactatttcatagttgccaagacactaaagttgtaggagtctcttttccagggtaaagagccctagtattacaaagccctgtactgaaaagggattaatgggttcaccatgtagttggagtccccatcatatttcttcttcgaggctgtacttctaatgaggagacaaacacctcagtaccagcaatctgccaggatgctttcttagacacaagtgctcctggagggcacagatgctggcacacagcaggtactctgcttacagacaatcaaaccaactaatcgtatatgaagactcactcatattgtgtaaacaatcaaatatcaactgtaaaatgtataaccattattcaaatattcatgactataccaaaattataaggtagacatcaagaaggcagtcagccccatagagaaatgtaggttttctgataacatggaagatcattctattttctaccagctactgatgcctggtaaccagccagcatctcaggtaggaacagcaacttagaagaaaaaaaaggcaagtgtcacctgacactccagggctcacgggccaagccctgccatagcagatcctactgagaactacctaggcacatgactgtcatgagggaccacaggaccactcctctttgctgggctcagctttgccttagtgaaaaagcagccaggagtaaaaaggcatctacttgccaaagttatacattgaattagggggacaaaaatggaacaaaactgttttctttgctgaattttgagtacacaccaactgcactggaaatcacttcatagctgagaaccatggaaggtgagaagcatttctgacatgatctagaatttccaaggcagaaaataacttttttttctttttgagacggagtctcactctgtcgtccaggctggagtgcagtggcacgatctcagctcactgcaactccgcctcccgggttcaagtgattctcctgcctcagcctcctgagtagctgggactacaggtgtgcaccaccatgcccggctaatttttgtatttttagtagagacgaggtttcaccacgttgtccaggctggtctcgaactcctgacctcaggtgatccgcccgcctcagcctcccaaagtgctgggattacaggcatgggccactgtgcccggccagaaaataacttttatacacagctgcttatgttacagagagagaaacagaggagcggaaggataaagagacacatccacgtcccactacaagtcagtgactgagccaggactgaactccacagctcatcaattcccagatttgtgatcttccctctatgccacattgacgctaagagctaaatacacacactttaatacacaaaaatctcacatagtactcatgaacctatcgactatagaaacccaagtattgatcttatttccaatggctgtcacagggcttagcttataccaatgtcacctcctctaaaacaaactcatatttaaggagcaaagctagacagacagtattatagcctgggaaagaccctcgatgctcctctaaaaagcaacacctcatctaaacatgacaatttgtaaagcaacttattctatcctagttcccataatgctggttaaagaatgaaatacaaggacacattcattaagtgtaggtcactgaatgcaaggaaaaaccaaatcataagatcagttagctggggcactgcacacaggtctccctcaaatgggataagtgaaactcagtttctcatggtctgtaaaagcaaagatgaactcacagaacctttgtggatgtgaaagttgaaaggaaatgtctgaattcagaggaagattagccattcattatgtctattttgtgcttcttaattggcttgttccatttctttgaaggaaaaaaaaagtcttacatttatccctcagtctataaaaggggaaataaaaactcgtaactccaaaacaaatcatggtgctccagtgtctgaccttagctaacaagctatggctgtcttctcagttggctgccataaagcctaccagtaaaatgtcaagtttccaaatgccccttgctcttggtgaaggaataagctaaaacaatgtggagaccaaatgcaactggccttgagttcaaatccccactccaaaaccagatgaagaacacttataacagtgtagtgtacttatctgccactgaacgacaattttttgaacagaaataaaagtatctaaataaaaaataaattttcaacttaatgaaaagattcatcttcgccaataagaaggtacatttgaaaacacgtatcaaatttgttccccaaaggcacccatctcccttcttcggttaggagatggttctactgtgttatctatctggccactgaagtaaaaatcagatgttataataaaacaagttagtcaccagcatctctgaaacaaaagtccaagagaattggacattttcccaatgagagttttcccaaggaaaaaacatcaacatacaatgggaaacaaccctctgacagaaattcactttattgtaaccactctcagaatcacatgatccattgtgatgagatgtaccctgaatataaggggctcagaaacagcggggatccacttcccccgctgttttcagcagagtggaaacagctgtcatacgacccaacatctgcatcctcaccagcacccagcccttatcactggagctcaggactcaccaaactcattttcctcctaaaagctaactagaaaacaactgtttctaggccctcttcacagcttttttttcttcattatttgcagttctgggatttgctgataaagtaactatagattttgatctgcagtattcatgattggtcagcaaatgcacaaaattcctatctaatctcccaccttggagcaggctttctgggaggataaaggaaggaggagggcttggaaccctactgaagttgaagaaaacatagaaccattctcagtaaagatcttttatttctaccacttgttaacactgtttaaatcctacgctgaaacttactattgtccagaattgaaatctatattgaggacattttcttgagttcttgttccatttccaactcaaaaaaaaaaaggaaattaagaaaagaaaaagggctcatccttatgacttcacaaaaaaagagaatattatcttacaaatttctgcccatttgaaaatgtaactgtttttaaaactttactttggagtaaaagccagtttttaaaactgcactctaaaagaaaaatttttgtgaaaagcagatgattaagaatgaaatcttaaaattcctatgcctgcccatgctcacaacatcgttataataattttttcatccatagagggcatccccagaacagaggtcactattctatttaatgattctctgttagagaaaaactgatgtggttagtaaggcgtgtggaacttaacttcaattacatcagagtctaatggtttcacaaatacaattcttagtgaactgtcaatctattaaggaaaaagtatggagactatcagagggtgtctaccagaatggaagatcaaattacctaccttgtgcagagggaggacaaggaacgctcctcccccacttgcctctatgattatggcaacaaatctgggattgacagcacaaaaggaactatcccaggtcacacgagaaacccggatgtcatcatagcactggtcatttttcaccgcttgcccaaatacatgccgaaacttgctctgtcgtaccactcgcctcatcgtgtctgcaaaggaagagtgagaattatgttagaattatgcaccaaactgaaagctttacttttacaaatgaaatgctccaagtaggaaaaacagaatggtatggcattttgtctgctctcctaaaaagtagccaaattgcaatccaaatttcttttagcagcacatacccggagacaactgcaaaatgcgtcagggaaagaattacaaagaaatgaaaaattcctaattcaagatccagaaacagctcatcagttttaatttcaatggaaagattaagggaaagaattaaagaaaattagcctttcagggttgggtgggagctgacagataatgtacttcaacccttccccttttacagataagaaaactccaaagtgaaattctctggtagaggtgaggctgaagaaagccgaaaaacaagttacgattttgtggctttgtcctcagcctgccaaggtaatttttcagattgtaaacattttccctagacatcaacactctgctgtctgagaattgtgtctattccccagagtgtttcaacaagaatagctatgggaggaattcaaaagacacagccatcacccttgacttcaaaagccttctaatctccttctaacacagacgtaataatcagagcaactcactaccaaaccgcctagtgctaagtggtacacagtgagaaacaggaaaagtcagcctaaagcagcctaacgggtaagagccaggtctgggaaaagcagagcaaaagtatttaaatggaaagcaatgtgatcaaagtgatgtttaggatgacagtaaatgtggcaggagcacactggacagcttacacaggaacaagctcaaagccaggtactgggctaggaagctatttgacagtaaaccagacttgaggaaggcctggagtgatacagcagtaacagttgggacctaggaaaggaaaaatgcaggggctattgtcggggggaaacaaaaccaggctgggttttcactgagctgatcatccaccacagccacttccctagtaaaccagggactctgaaggggaggggaggtgacacagagctaggttcctaggctgtcttatgtgtcatttcagactccaaattcgactaaatcatctgatagacactgaaagctttgtgctttcagatcaccaggccctccctgattaagatttcctagactgcacccaatgtaattttcctatgtgctactgcaggacattctgttcatgttggttagatagaaggagcctggataaaaatctaagtggaaatggaacatggttcaacatcgacaactcagctgaaaatcagatcctcatatacagaggagagctaacacctgtccactcatgccagacgagacacatggtgggctgttgctaattcctttcctctaattcccttcctcatggccctgagcccactgctaaatgcagagagacgaatttatttttgccagagtctcttacccttccaacgcatgtgtgaaagtggcctctctccaatgctgggggcatgtagccgggctgaagtaagagacccttggcaggcaattgagcatccacgttccttagcccagctgttattgccagactttcccagctgactaccagggccatacattttgagtctttggtagaggagatggcaaatgattcgtggccagggtccttcattttggaatcaatatgaatacttctcaagcgtgagttagataagacagcttccatgaggtggtgaaaagcaaaaggaaagcacatctatacaaaagccaacgtacagccagctggtcttgggctccacttccccacacaaccatctgcaaccatctgtacaagttatagaagctgcaatccctaccagcatcttcaagcaagtgtttcaaaagtaagctaatgtagaagaaaaaaggattgcaccatgtcagagttaacatccttcataaataaaacgttcttacaaattcatacaattaaaacccaacagaaaattagacaaaggatatgaagaatttacaaaagaaacacaaacagcacttatctccactccttcctaaaatcctaataaaatgaaagcaaaaaataaaagcaggtaaaaacatgaaaggacaagaggactggaaaagaggctacaagagagcaaatgtgacaataaactttcgaagatggaaagctgtcatgcacgtgtaactgactgaagtgtgagtgtcctctactcagctgagtctcaggaggagcgcacaaaaaggacatcaaggcccactgtgaatccccagaacactccaaggagaaactgtgtgtctccaaagacagggatgtgggagagggactacagagaaaatgactgaaagcctgaattaggagcagctggacacccagatcccagggctgcacaaccagggtactggcctgccctctccccagcagaagccaggagaggcctgactatgggcctggatgacacccagcacaggtgtgaacagatgcctcactgacagcctggttctatacagtggggcctccagccccttgttcctcctggctcccaagataccacctgccttaccccacaagagatcagacatcactgccctcagtgaggtccaccattcaatgtgcccctccactcacacaggcataaggtcagcttttagaacctcacttttaaatgtgaatggatatttgaggaaggcctctcacttgaaaaagagagacgatttttcctcttcactcaaataggccagataccatctaacctcataaaaataggaagattaatataaatatgtaaaatgctttgtcttcattgaaagatactatacaaatcttctggctgacatacatactaaactaccttaaaaagtgatttccaccaggcgcagtggctcacacctgtaatcccagcactttgggaagctgagacggatcacgaggtcaggcgatcaagatcatcctggccaacatggtgaaaccccatctctactaaaaatacaaaaattagccgggtgtggcggcaggcatctgtaatcccagctactcgggaggctgagggaagagaattgcttgaacctggtaggcggaggcttcagtgagccaagatcgcaccactgcactccagcctgggcgacatagcaagattccatctcaaaaaaaaaaaaaagttatttccatattatgcatacttattttcatcctaaatacatgtggatagaatgatatagaagttcttttgctacaatcacagagtagaatgttagctacagggcagagacagtaagaaaagccagtgcttccgcagtgctgtgctgagtcaggcatctctaagcggagcttgaagggcagtgtgagcccattcacttccaaggtcaaatctgatctgggctcacctgtgtacatgtggcatagccgcttttcttgcacagaatgtctcaggccctccaggcacacaatagagtatagcaattaagagagcaaactccagagtcagacagcctcgtaagtgagaagcacagctgtactatttacttcctggccgtggtacagtacagcaagtcactaagtctccattaagtgtaaaattctctatccaaaaatgggtacaatgcatataaagttgaagtgatcattaaatgatcaattggtgatgggatggtggcaggagattcttatgctataatagtaccttgtatggttaaatacacaaaattaatcactcaataaatactagctactattgtcatcctagtaactgacataagataatttggattcaaatctgagctctgcaacatattagcaaattacttaacctctctgagcctcagtttcccattcacaaaatgaagggaatgatacctgtaataagaatgtaggccgggcatggtggctcacgcctgtaatccccacactttgggaggccgaggaaggcagatcacttgaagtcaggagttcgagaccagcttaggcaacatggtgaaacccagtctctactaaaaatacaaaacttagccaggagtcccagctactagggaggctgaggcataagaattgcttgaacctgggaggcagaggtcgcagtgagccgagatcacgccactgcactccagcctaggtgacagagcaagaccctgtctcaaaaaaaaaaaaaaaaaaaaaaagaatgtaaaccaaccacagacaagaaagcccagacccagatgacttcactgctaaagtctatcaaacatttaaaaaataccaagtactcacaaaattttccaaagatagagaagaagggaacactttcaaactaattgtatgaggccagtattatcctgataccaaaaccaaacaaagacatctcaagaaaattacagaccaatatctcttatgaatacagatgcaaaaaatcctcaacaataccagcaaacgaaatcaagcaacacagaaaaagaattagaattatacaccacaatcaagtgggatttatcctaggaatgcgaggttgggtcaacatctgaaaatcaattaacgtaacacattatatcaatagaagaaaaaaaaatcacacaattatctcagacacagaaaaagcatttgaggctgggcatggtggctcatgcctgtaatcccaacactttgggaggctgaggcagggggatcacttgaggtcaggagttcaagaccagcttgcacaacatggtgaaaccccatctctactaaaaatacagaagttagccaggcatggtggtgggcacctgtaatcccagctactcgggaggcagaggcaggagaattgcttgaacccgggagatagcagttgcagtaagccgagacagtgccactgcactccagtctgggcaacagagtgagactctgaatcaaaaaaaaacaaaaaaaacaaaaaaaaagcatttgacaaaattaaatactctttcatgataaaacactcaagaaactaggaatagaagggaatttcctcaacctgataatgggcatccatgaaaataccacagctaactcaatattcaatggcgaaagatgccttctccctgagatcaagaataagatgagcttgtccacccttgccacttctattcaggattgtagtacaggttctagccaaggcaattaggcaagaaaaaggagtaagagacattcagattggaaagaaagaagtaaaactatttctgtgtgctgaagacatgatcttatatacagaaaatcccgaggaatccactaaaagaaccagtaagttcagtaaggttgcaggatacaagattaatatataaaaatcatttttttttttaagatggagtcttgctctgtcacccagggtggagcgcagtggtgcaatcttggctcactgcaacctccgcctccggggttcaagcgattctcctgtctcagcctcccgagtagccgggactacactgcacccagctaatttttgtatttttagcagagacagggtttcactatgttggtcagactggtctcgaactcttgaccgcaggtgatcctcctgtcttggcctcacaaagtgctgggattacaggtgtgagctaccatgcctagccgtatttttataaaatcataacaaacaatccaaaagtgaaattaagaaaacaattccactcacaatacatcagaaataaaatacttagaaataaacttaatcaaggagatgaaagactcatactctgaaaactcaaaatactgttgaaagaaattaaagacacaaatgaatgaaaagaaattccacattcaaaaatcagaagacttagcattgagatggcaatattccccaaactaagatatagatttaatgcaatccctatcagactcccagaagaattctttgtagaaatggatgaagggattgattggaactgcaagggatccaaaaatacccaaatgaccctggggagaaaaaagagaaaaagttaggaagactcctatttcctgatttcaaaacttacctcactacaaagcaacagtaatcaagactgtgtggtactggaataaggacagacatttatatcaatggaatataattaaagtccagaagtaaactcatacatctttggtcaactgattttcaacaagagtgccaagacaattcagtggaaaaactcttctcaacagatggtactgggacaatacgtaaaatagctaactcaaaatagatcaaagacctagacataagagctaaaactataaaactctgagaagaaaacataggagtaaatcttcacagccttggactgggcaaaggattctaagatatgacaccaaaagcacaagcaacaaaagaaaaattagaaaaactggattccatcaaaatttataaactttatgcctcaaaggacactatcaagaaatcgaagacaactcatagaatgggagaaaacttttgcaaactttatatctgataagacacttgtatctagagtataaaaagaactcctacaattcaataataaaaacatagtccaatttaaaaatgaatcaaagggacttgaatagacattttccaaagaagatgtacaaatgtccaatacacatgaaaagttgctggacatcattaatcaatggagaaatgaaaatcaaaaccacaatgagagactattccatacccactaggatggctaaaataaaaaattctgagagtaacaagggttgatgagaatatagacaaatcagaaccctcatacactcctggtgggaatgcaaaatgttgcagctgatgtggaaaagtctgaaagttcctcaaacaattaaacaaagcattatcataagacccagcaatccactcctaggtatacactcataagaactgaaaacaggtagtcaaacaaatacttgtacatgagtcttcatggaagcattatttacaagagccaaagggtagaagcaacccaaatacagactatccattgtatccaatggataaacaaaatgtgatattacctgtacaacagaatattattcagcaataaaaaggaatgaagtactaatacatgctacaacttggatgaatcttaaaaacattataaatgaaagaaaccagtcacaaaaatcgacatactaatttatatgaaagtccagaataggcaaatctagagagacagaaagtagattcatggttgcttagagtttttttttttttttctgagatggagtcttgctctgttgcccaggctggagtgcaatggctcaaactcggctcactgcaacctctgcctcccaggttcaagcaattctcctgcctcagcctcccaagtagctgggattacaggcgcctgccaccacgcccagctaatttctgtatttttagtagagacagggtttcaccatgttggtcaagctggtctcaaactcctgacctcaggtgatctgcccaccttggcctcccaaagtgctgggattacgggcgtgagccaccgtgctcggtctatttattatttttttagagacagagtctcactctgcactcagtgtagtggttcaatcatagctcattgcagcctgaaactcctgagctcgagcaatcctcccacctcagcctcccaagtagctgggaccacaagcgtacgccaccacaccaggctaattttttttttggtagagatgggggtctaaccatgttgcccaggctggtctctaactaattgctggctttaaggaatatttccatctcagccttccaaactgcttggattataggcattagccaccatgcctggtgtgtttcttttaaggtaatgaaaatgttctaaaattgactgtgttgatggttgcagattatttgattatatatatatactataaaccgctgaactgtacactttaaatgagtgaattgtctagtatgtgaattatatctccaaactgtttttttaaaaaaactataaagtactcagcatagaatctgaagcatagtacatactgtctaacaaatgttggcaattattatttaagagcccagtaatagcttttccctatccagggagaaaacctaagcaagtccctactgattatgggctaaaagtagaattttcatataaaagaaccggcaccacttatcaaggactctttacagaattttatgttctcccatttcagcacggtatttctgcagtttaatttctctgcaaacaaaggaaaaattgggaactatcccaaacacaaaaacttcctcttcttaagagagctgtctgcattgtcaaatggtattagtgttttaccactttaaaaactgttcagttttaacctttaaattaagatggcatatcaccaaacttaggagttctgttatcagctatattgtcccaaactgatcaaatcataaattagatgactaaaatgtccccctaaaactaaagcattttataaagggatctaattttctcaaaaaagaaaaaaaaagagtaaatgaaaaaatcctgaactaacacaataggcacaaattccaaggaaatactaggtatgattttaaatgtcctgtcagagagtggttcaactttggaaaaactgcttgctcattaggtctttcaagtacaagttcttaaaactgcataggctttcccttgcttgcaacagtaagatcatctcagtaataaagaggaagacgatgtagcagtaagttattcactaagcaaatcaaaggaatatttacaagtttcaaaataaacttactttcaatgggagataatgcaacagagtttttaacctctacaaaacatgggaaatacaaaccttacttgtctttttaagatgtaatttatcactctcctcctattttccaatacaacagcaactattctagaatggtttttattataataaaaattgatacacctttgagacaatgcaggaataggttgagaacacaggctcaactatgagatgctctctctgggcgttggttgaaacctctatcttagaaacatggacagttgtctccctcaccaagttttccaggtgatactgaaggccaaaaaggaggattacgggctgctctgcctatggagtaatcattcttttattcctttactttcttaataaacttgttttcactttaaaaagaaaaaaaatggattacgggacaggttttgactatccagcaactgtcataataaatttttaataaggagataacacactcctctttttatcttcaaataaaatgtaaaagctgataactaatattcataatacttaacatctaaggaaacaaaaaagttaaaatttttctttttttttttctttttttttgagacagagtctcgctctgtcaccaggctggagtgcagtggcacaatctcggctcactgcaacctccacctcccaggttcaacgattctcctgcctcagcctcccgagtagctgggacaacaggtgtgtgccaccacaccctgctaatttttgtatttttagtagagatggggtttcgccatgttggccaagatggtctcgatctcttcacctcatgatccgcctgcctcagccttccaaaatgctgggattacaggtgtgagccaccgcgcctggcctaaaatttttcttacatgttgggtgaatattttaaccaagaacaagtaaaaataaggtctacctctatggtttaaaggctttatgtgtcagagaaaatttgtactcttgcaataaaaccttcatcttattagtcaggtgataatcctcaacctctaggagagtgtaaaggcatgcttcttataatactaccatgtgaagttaaatgtacaaaatttacatgccaggcacagtggttcatagttgtactcccagcattctgggaggacaaggcaggaggatgactagagtccaggagttcgagaccagcccaggcaacatagcgagaccccatatctacaaaaaataaaaaaaaattagctgggtgtgatgttgtagtatacccctgcggtcccagctactcggggagctgaggtgggaggactgcttgaacccaggaaatcaaggctgcagtgggccatgatcatgccactgcactccagcctgggtatcagagcaagaccatgtctcaaaacacaaaatacaaaagaaagaaaagggccgggcatggtggctcacgcctgtaatcccagcactttgggaggccaagacaagtggatcgcctgaggtcaggagttcgagaccagactggccaacatggcaaaaccccatgtctactaaaaatacaaaaattagctgggcttggtggtacatgcctgtaatcccagctattcgggaggctaaggtaggagaattgcttgaactcgggaggcagaggttgcagtgaaccgagatcgcgtcactgcactccagcttgagtgacagagcaaaactccgtctcaaaaaaaaaaaaaaaaacttatcttataagctacataggaaacatgtagggtgttaggaggaaaaaatgcagacaagacagggtatttatattgcaacagcaccaaataaaatacactcaaaacacctgagtaaatgttacattttctctattctacttccatctcataaaaaatgacaattttgacatttttcctgtttattgaaaagctatctgtttaaagattccagcagatgtacttctatggttcatatgaaaggaaacacatcctgctaggaacacatacaggaaaacccctactagtagcaaaatcctgctcagcccatttgctgagaccattccagggcgtcgattactcaagcgttcagtgggcagagaatgctccctcagccagtggcaaccacaagactctaaaatgtcccattagaggaaagaccatgtttcctccaagccactgttacctgtatggcaggtactttaatgtagaagagatccgatgtgttattcaatagaaaaaggcaggtaagacagcagatgaggagacaaatatcctaaactcagttatttaaatgacaatgccaacagtaaaaaattccttttaagaagatggaggccgggcagggcggctcacacctgtaaatcctagcactttaggcaactgagacaggtggattgcccgaactcaggaattcgagaccagcctggccaacatggtgaaactccatctctagtaaaatacaaaaaatcaggtgggcgtggttgcaggtgcctgtaatcccagctactcaggaggctgaggcacgagaattgcttgaacccaggaggtggaggttgcagtgagccaggattgtgccactacaccccagcctgaacaacaagcgaaactgtctcaaaaaaaaaaaaaaaaaaaaaaggaagtgggaaatgtaataatatataagcctacatagaatacacattcacgagagagcagacacccaaagcaaatataggaggtactctgattaaatataaaaatttggccgggcacgttggctcacgcctgcaatctcagcattttgggaggctgaggtgggaagatagcttaaggccaggggttcaagaccagcctggataacataatgaggcactgtctctaagaaggctgatgcaggaagactgcttgagcccaggagtttgaggctgcagtatgctatgatcatgccactgcactctagcaagatcatgtctctttaaaaaaaaaaaaaaaaaaaaatcatcatttccgaatatgagatagctgagctttttcaaattttctaaattaaatccagcagtgacactcaaagaaagaatttacctaacgaattgcatatttctactgcatgcaactctttaacagattcatacatgagacattccaagaaaaaaaaacatgccttacctattttaatagaagctgtttttaaaagaggaagaaaaaagaccacatgcaacatttgctataaagcacagcaaaatgtcagatacacaacagatctcctcatacacagcagttttggctgaaagagatttgtattccactgctgatatggacttgttgaaaaaaatgttttttctagaaaaactattgaccacttagcatggccgactgactgcaagtatgaatagccttgatgttggttcaattgattataacaccaggaatggtaaaaattaagggaaaaaaattcacatgtattacatagccttccaaatagtttcatcccatcattattaatccaggtaacaggtaagatgccaagaatgaggcataccagtaaaaatgcattttgtttcaattcaataactcaatatcatttagtttttaaagtttctaagaataaagagaaaatgcaaataagatctaccaagaagcctccaggctcgggcctcacagagctaggcctggagagagttccaaagctcatcaattccaggcccgtcacgtttcagcctgaagacgtataactcctccaaagataaagaacttctgagaaagatgcagtgaccttgaactacaaagtacggagcagttccaacttttcagcccatgaactgtcatacttttccaacaatcaatcccgaatcatatatacaattcagtttctccacatcagccaacaatggcacttagagctctgtcctgtgggtgctgctttgacagcccccagtccagttggccagtttgtgtaacactttaaatgtgaaactgcactttgcctacactttataaatatgagtaaaaatggaaaaatcaaaatacagaaaccagctgtaggcattcaaatgtactgagacaaacaagagggtatctgttatgaccaaggaagcaaatcttacttctcactgaaaatccttagcttagccagaggactatgtgctcagttgtccaagaaaagaacaacctgggccgggcacagtggctcacacctataatcccagcactttgggaggccgaggtgggcggatcacgaagtcaagggattgaaaccatcctggccaacatagtgaaaccccatctctactaaaaatacaaaaattagcagggcgtggtggcgcacaactgtagtcccagctactcgggaggctgaggcaggagaattgcttgaacccgggaggcagatgttgcagtgagccaagatcgcgccactgcactcctccagcctgcagcctggcaacagagcgagagtcagtctcaaaaaaaaaaaaaaaaaagaggaacaacctgaaagagcatgcataaaacactagaaacacacacacacaccccaaggatagtatctaaaaggtgagacattacaggtgcggtggttcacacctgtattcccagcactttgggaggctgagctcaggagttggagaccagcctgggcaacatggcaaaactccatctctaccaaaaatacaaaaaattagccgggcatgatggcgcatgcctgtggtcccagctactcaggaggctgagggcaggaggattgcttgagcccaggaggcagaggttgcagtaagccaagatcacgacactgcactccagcctgggggacacagtgatacccaaaaaaaataaaaataaaaataaaaggtgaggtataataaagaggtatcatactttttaaagttttcaaagaagagcactcgtatatttacattttataatctatactcattttaggaacttcttacaaagagacttggttggggaccacctaaagtcaaacctaagcactcactggcaatgtgaagcagaaagcagtgagcgcattgcagagcgtaatgtgacgctatgaaaatgactgccgaaaatcaagtctgacaagaagtaaaatgagcagcaaaacagtaacacataatgaacctgaagacaaaagataaaattcctaaaactgggctgggtgtggtggttcataccagtaatcccagcactttgggaggctgaagcaggaagatcccttgagcccaggagtctgaggctgcactgagctattattgcaccactgaacttgataccaaaagacaaagcgaaactgtgtctcttaaaaaaacaaaacaaaacaaaacaaaactgtaattccctcacatcttattaaagagagacccttttatgaactaaaagatgccataatgaggcctgtaactcacttaaaatataatagaaatgacactacagaaattttgcagttactaaaatgtgagaatatataaggacttcgaaatcatctctagctcttcaatgacagaaatatatatttctattacagagataatgtgcaaggatgacatgtttacaaccctccacatctcccaattttctgcttatcaccagcatctttataaacacaaccacctcttttggtccctggagctttgaaaaagcattgctgaagaaacgtcccttgggaagacaaaggcaggcgctacctgacccgcctcctccctccccccctcccccccgcatactcacaacactggcagcagccatctccctaaagtgcaccacaggagaccagactcagaagcttaattctgtgtctctcttcaaagagcagaacacaactcaaagagccaaattaatcccaagaggtctcacaccaaccgcaaaacttttatagacatgagtgacctagcaatctcacttaaaaattaatccttgaggccgggcggggtggctcacacctgtaatcccagcactttgggaggccgaggcgggtggatcacaaggtcaggaaatgagaccatcctggctaacacggtgaaaccccgtctctactaaaaatgcaaaaattggccaggcgtggtggcacgcgcctgtaatcccagctactcgggaggctgaggcaggagaatcgcttgaacccggaagtcggaggttgcagtgagccaagatcgccactgcactccagcttggcaatagaacgagactctgtcgcaaaaaaaaaaaaaaaaaaaaaaaaaaaaaaatccttgaatatgtttctaaacattctttctatattgatgacctacttttcttatcaacaactggtaaaaaacacactgtgtatgacagttcaaacttgttaagtctgtttttcactacttagtcatatggagtagacaataaaattttattaattatttggcaatactgttataccaggaaatgaaattactggatgctcatatcttaaaaagggatgggggatatttttattaataacttcataaggctagtcacaggcaaaactagcagtgtcaaaaaacaaaataatcaccttcacctgaagaatttcagccttccctttttaacccataccttgggcaagcggagattaaatggattaaatgaacatgtactcctgacagtgtttcaaaggaacattaaggaagagtaggaaaatctctggcttggatgtcagacacaaatttatcttgacataattacctacccagctagatcattttggtcctctggttgtttgtttcttcatctataaaatggaagaactaaaataaatgatttctagggtcctatcagagtctacaggaaatccttctttcactgggatacagtccacatcccccccagtaaaacagacacaactcactgcaaaccacattacttactaacatccacagggttatacgtattacatatatactcaactatgaatgttgaataggtccttaatcccagtcattcttttgttcaacaactattcactcggctttgaccatgcgcctagcaccatgctagacatgagagacacaactgtgagcaagcagacctggcccctgctctcatggagcttacagtccactgcaggagacacaacacaatcagatattcgtgcaaacattagcatgccgctgtggcaagtgctggaatgcagaagaacacaaggtaactgagtcaataatcggggaacagaagcagtcagagaagcgacacttaagctgaaatcaaagaatgagaagtcaactgggcaataagagaagaaaagtgagtcccagctgggaggaacaacaaaatatcaaaagtctgtatcaaaagcaagcacttgtcagaatctggactacttagcccacagaggctggagcccagagagcaagggtagaagaggctgcgaggtcagcagaacccggatcacagagggctttctaggccatgttaaggattttatctgtacttgcagtcttgggagccataggaaattttttaagtatgagtatgtgacataattagatttgcattttaaaagctcacgctgaatgaagctggagaatggatctgcacgtgggagcatctgaaaggattcagggaagctagttaggaagtcacggcacttgttgtccaggccacaagtcacagtcccagtagaaacagagatgatggagccaaaagacttgaagtcaactgaatttaaaactgttttagatatgaagggtgcatcaacagtgatgcctaatttgactcatgcaaccagatggttgggggtgccttcccaccttctctttggtgtggagacttacttactacctcttagtagtagcttcaaagagccttctgttgacaagtaaggtatctgaaaagagtaaaaccatgggaaaaatactttaaaatttattttttaaaacataattacctttccacattaataattggatccatggctttaaaattatgtacttttgctcgcaaaagtgtctggagcttgaagaaaaacgtattgagcatgctatttgaaaatgaaaactaggccgggcacaatggctcacacctgtaatcccagcactttgggaggccaaggcgggtggatcacctgaggtaaggagttcaagaccagtctggccaatattgtgaaaccccatctctattaaaaatacaaaaattaggtcaggcctggtggctcacgcctgtaatcccagtactttgggaggccaaggcgggcagatcacaaggtcaggagattgagaccaccctggctaacacgttaaaaccccatctctactaaaaatataaaaaattagccaggcgtggcagtgggtgcctgtagtcccagctactcgggaggctgaggcaggagaatggcatgaacccaggaggcatgaacctgggaggcggagcttgcagtgagctgaaatcgcactactgcactccagcctgggcgacaagagtgagactccgtctcgaaaaaaaaaaaaaaatacaaaaattagtggggtgtggtggcacatgcctgtaatcccagctactcaggaggctgaggcaggagaatcacttgaacccgggaggcagaggttgcagtgagcagagatcatgccactgtactccagcctgggcaacagagcaagactccacctcaaaaacaaaaagaaagaaagaaaagaaaagaaaatgaaaactaacactgtttaaaataaaaatctccctatgtttctggaattttcagacatcctatagaaataggaaagtatagcgcttacaatcttactgcaccttaggaaaaataattttgtctgcctgatcccttttggtaaaattaaaaatatttccttatcagcatatgcatcttctaaagcgaaggaaaaaacaaaacaaaacactcaatatcagtatctataatagagtacaagaaactaagaatttaactcactggagataatgtagttactaccaaatactttaccaccattcaatacctttagaagaaggtctcaggctcttcaggaagaaaacagcacacattcaatttcaccaataaaatgaaaatatctctagggaagtgaagacaaataaacacggcccactttcagaaggaaacatttgggctaaatattctaagagcaaatactctactacaaaaagcttttatcagctgtagctggtaaaactgtagccctaactctcccaaatccattttccttccaaactgtatcaagacttgaaaattataatctttaattctctatgctaaattaattggacatcacaatagtaactaaagagaaattatctattccttatgaaagtaggacaaataattttaagtagaaggccagcaaaaagatccaggggcttcctatccctaatacttttttaaacaactacatttatggtttatggtaccctcaaaaaactaccagaaataacacacacacgtatacacacaaatgcaattacaaaataattcattttttgtgaccacttatcgtgaatacaatataaaccaaagtctacagtttttcagactttagtatgtataaatgaactcctaagcgattagatcattttaacagttgtagtggtgcacaattcaccctatcttaacttactcggtccttgtcaaattctcaagtcaaacgaattctcaaatacattaaatccttggggctccaggagtcactcaaatgccctaaggcctgccctatgatttctctggtgctgggcagggcacacctagaggtccactgcagacaaacctccaccttcacctcctccttcagggagaacataaggctatttaatgacaatagcgcattaaaggatgagaaactcaaaaagagaaagatagtgaaggaaaacagctttttcaatggctaccttaactttaaatccccttgacagaaattatggttcttgccatatctatcttcattgttaaatgaaagcatgcttccattgggatgttacttcattgactctaaagtcaaacttgctaaccaggccaggcacagtggctcacgcctataatcccagcactttgggaggctgaggcgagaggatcacttgagcccaagagttggaaaccagcctgagcaacacagtgagaccccgtctctacaaaaatattaaaacattagccaggcatagtggcgtatgcctgtaatcccagctactcgagaggctgaggtgggaggatcacttgagcctgggagggcgacgctgcattgagcctcaatcacaccactgcactccagcctgggtgacagagcaagaccctgtctcaaacactcatacagacacacacacacgcacacacaaacttgctaaccagagctataaaatacagccataagaaacccatgctgccaatagttttaatttattcaagaaatcaattaagttaatttgtgatgagtaccaaaatgttgtgttatcctgctttttatcagaacatatgctttaaataatcaaaaccccaaaatttgctttacaaataaagcatgtttcaataaaggaatgtgtatgtatatctgtgtgtgtaaatttacacatataaacatcttgctaacatatttatttacaataaaaattacgaagttagtttataataacataataagaattttttttttttatttgagatggagtctctctttgttgcccaggctggagtgcagtggtgcgatctcagttcactgcaagctctgtctccgagttcatgccattttcctgccctcagcctcctgagtagctgggactacaggcgcccgccaccacgcccggctaattttttgtatttttagtagagatggggtttcaccatgttagccaggatggtctcgacatcctgacctcgtgatccacccgcctcagcctcctaaagtgctgggattacaggcatgagccaccgcacccggcaaatatttacaattagtagtcctaggccatagaaaacatctttattcctttcatcttctaggaaaatggaaagactgacaatatcacaagtgtatcatgcaaagttgaaattcaattactcaattaacatttattgaacagctactatgcaccaggcaatatgctaggaaatggaggcaccaaaaaatgtaagatatcctctacctttaaggaacatggaatatagcagtattataaggtgttcactttcacaaactgtaaaataattctgtactcaatctctagtcatttaatcccagatgtaattagtattagcatagaaatcactaacactagtgacacccacaaattacactttcacctacctttataactccataaccaaactatatttacattttactctaacatattgtataaatgcataacctattatcatcactttccataatcagggccatctcatctacccatcttacactactcttccctaattacaccagttctgagtcagcccagtactattaggcacaccctcaggcaggatctcactcccagtgtcccacaaacactgactctccaacgcctgtctcctgaattcccacagagctcacagtctatactgcagaattcaccatcaaagagtcatgtgcttgagggctggaggaggcttgtaatgtattttttaaacttttacataatttaaaagtaaatcaaaacattaagcttgccataagactttgtgaatacgaattttttaaatgataccagaaaaatcaagtccctaatatattttgcatcataaaatgtttgaatgaaaagagttctttgaaaccagtagttcaaacccttcacagaggcactaacagaatggagaggtcaataatttcccactgtttgatgaaaaaagtgactttttgataagtttataaaagaatagaaaaatagacaggacgagtgcccagctctggccattataagatgccccaatttacaatcactaccatgccctgatcaactttccaaaggtcacagaaaccaagccacttcgccaaaacctaagaccctttcaagctgtgaagttcccaaatggaaaagaaaaaaaaaagatcagaaagtattttgaaaaaaatttagcagagtcactgttttggagtgacaggaagaacctttctaaagcaggcatggtttcttcctgattccaggtatcaggactagcctccttacgtggggtctgcctgacttcacatgcctctgctcaactttccccttgaaaccttgctgtaatgactgaatgcaaacatttcaaagagacaatctgtttatcagtaaggaacctcctctttaaaaatattaacattgtacacctctaaaagggttaaagaacatgagtgaaatgacatgaataaagcctgtagtcatcccaaccctgaataacagcggtagtctagcagggaaatgaatttgaaccatgtgctttgctaccatgatttaaagaaagtgagcttaaccagggaagtagaagcttcaaattaagagagagatgaaggaggatgaagaacaaggagggccagcacagacctggagggctgcagtggcatgagacccctggacgccacacagcctgcacagggaggctcctggggcatggggcatgagtccttacttctctttcacatgactaccagctcccaagatccagaattccactatcaccataaacaatttcaaaaactgctgtgaattaaacagattccttcagtctaggctgggaacgtacccaccacttacaatgctgaatcaacacaatagatagaaattactactagtagatctgagttccaaataactgagttagactctggaacacaacccagtcttgagttggggaccaaatgtacacactgcctgcctccaaaacagaaatttcatctgggctcttgctcattcactttcagagaaacacacagttcataaccatcctttgaaggtatgatatgttatttgttctacttgataaaagtaattcagtccactgcactcaagacactgtcataatgcataaaaagatcaaactagcagtcttagggagaaaaaagaagacttccaacttatcttttcctacagtagcactgtaaagcaacagtggcccacagaagagagagcctaaaggacagttactctatttctaaaacagacaacgtgcatcttattaaatatcacccccaaagaactgtggccagccctcattggctccagcctctctcttgcttgccaagaaaaactaggatgacattgttaagctaaagatactactaaccacaaaattaattcaccatctagcttccaaagtgactagtttcctaataaatccctctgcttaacagagatgacagcgcactttcacgtgtgttcctcagtccccactccagccacatttgagtttttatgttaataaatcagtcaattctttaagttcctaagaatgaaaggaattagaatctttaactaggaaagaatgcttgaccattacgaaaaggaatttaagtatctttcctgtgaagtaagcaaataatggtgattaaacatttgtcataaggaagggatgcttgtgaattttgtcatgcacccctatgatatcaaaagtagaaaatacagcctgacggcttcactctcctaacacttcctttcccatgtgtgtctactatggtctctcatgaaaaatctacagctttgttcatccagaatgaaggcctcagcagttgttgagacatggggacccacacccagttccacaatggagcaagaaagtctcttacaccaaaccaccatgtgaccagacttgcagtctgtcttggtttcccaaagacagaacaaccacattgtgaaacaataatcaacctttgctaatcctaagtggttttcattatgtctgttacaatctatatattaatagttcagtactgggcctgtgttgttcctgtctaaacttggtgttttcaaatacagacggcctactaatgccaatttttctggcaagatgcaatgcaagggcacctttgcaataataatcggtcttccaaatacaagacaaatctttaaaaccactgcttactagtgctcagattataagactgaggaaatttaaaaggatcaataaaatactgtcaaggagctttacattaaaaatagaaatcaagtttaccaaaggtttatccaagagatatcatgtattttcaagtttcctaaaaatgcatctaaaaatcctcctaaaaacctggaccaaacttcacagtttaatacatgcacaacctgaatatgtgggaaaaagcaacaacaacaacaacataggtacatgctaccaactgtggtgattaactgaagaaaactccgtgaataggcttggtttgcagatctggcaaaagagcatgacgaaaggctaagcaaatggaactgctgcactgggtcaaagactacaaagggaaagccatgtcaggttcacattgttaaataaaaaatccacactatactataaattcacacaactaactataaaaattaattcataccacacaaaggaaggggcagttaagttcctgatcttgggtaaatctgtcaagctcctgccaccaaagtctcctcatctgtaaaatgaggaatagaccagcccacagtgcttcctgttctggctgtgattcagagtcaccagggaactcacacccaggcagctggattcatataggtccacagatgatcatcacaaggcagtcaagaatgaggacctctgtacctgagcaataatctcccaaatctcccaaaataatatatcctttaaaagatggtgagatactggtgccaaatataatccattattcataaatttttaagaagaaatgtagatcattgcctgaccaaaggggaaaaaatataactgccttccacatacaatgtataggccttcctactcccatttatagtctctctcactctgacctttgcattatattaattactcattactgcagcaaacgggaggaactgtatttttgttattaatgtaagatccaaatgacaggcctaatttaacataccataaaactatagaggctcttttcccacacaggatgttacactttatcacactgtaaccagaagagttatctcaagcactgcagtgcaatctccttcaaatcctaaaaaaatccatcttttgccaggaactttccttaaaatggacagacagacacacagacagagagactgaatacacagacctgaatagagaagactgtctgaatagacatttccaattcagacagatgcaaaaacactggaggtgtttttaagaccgccttcccatcctaaaattagacattttttgccctcttcagtgactcaactttgattcaaagtctaaaatcctcaggtgggagtaggaatccatacccttaatagcttaatgtcagatgtaaaatgtattaaacttactctatttgcttctctgcagttccattcattaacagacatttaagagagaagagagggaacaggaatgtattcagtacctactctgtattaggcacttcatataattttccttgcttaatcttgccaatgaccctgcaaggtaagccttttgcatctccacactacagaggaggaaagtgaagctcagggaggtgagggagctggcaaagtcacagctagcaagaagcggagccaagagtgaagcccagctctatctggccctaaaggcctgcaccctcacggcctcagttcccctaaatacaaaactctcttagaacgagaactacagaaggtacccatagctcactgtccctaactagacaaaaaagttgacatttttctttctcttctgtactaccttgccacaatccaagctttaacgaacacacaaagaaaaggtatcccgaaatggccaactggtttctcctaattctcagaaaggtgctaagtgaatttatttatttatttatttatttttttgagacggattctttctctgccgcccaggctggagtgcaactctgtcgcccaggctggagtgtgatggcgcagtctaggctccctgcagcctctgcctcccaggtttcaagcaattcccctgcttcagcctcctgagtagctgggactacaggcgcgtgccaccacacccggctaatttttgtatttttagcagagacaggttggccgtgttggccaggctggtctcaaacccctgacctcgtgatctgcccgcctcagcttcccaaagtgctgggattacaggtgtgagccaccacgcccggcatgaaatatttttaattaaagtattttaaaaataaacataatctgggaggccgaggcgggcggattatgaggtcaggagatcgagatcatcctggctaacacagtgaaatcccatctctactaaaaaataccaaaaaattagccgggtgtagtggcgggcgcctgtagtcccagctacttgggaggctgaggcgggagaacggcgtgaacctgggaggcagagcttgcagtgagctgagatcgtgccactgcactccagcactctagcctgggcgacagagtgagactctgtctcaaaaaaaaaaaaaatgaacataagaacacaaaatataactaaagaatactaatttgagtcagacaccccaagagaggagagcatgaacaaaagaatgaagaggctgggcatggtgcatcacgcctataatcctagcactttcggaggctaaggtaggagacttgcttgagcccaggagttcaagaccagcctatacaacatagtgagaccccatctctacaaaacattaaaaaaaaaaaaaaagaatgaaaagaaagtacacacccttaaaatccaatttacaaccattctcatgagtgtgacaggggtagttccagtactaactgaccaaatactatcagggtcggcctgtatgcatttggtgtgactaaatcgtgttcgctggccatctaccctactgaggagactgtgcgccagtcattactgttcatcgggggaaagaacctggacgagaatgttctgccattggggaaatgttttaaacactcagttttacatttgagcactttttggtaagagctggacttggatgccagaagggcaaaagggagttaccccattcatgttattttaacataggcaataaagacattcatgataatcagagaaacccactgacctcaggatctttccagttaacttcaataaacaatcattcattcagcgaatatccagtaggcactaatgaccaagccatgaacaagagaatctcagtctgccttccatgtgaattgctctattgcattctgccttgtatggaaaggcacctttcagactattagctcaaattcaggtccagttctttgtagcaaacagtcctgatgaatgtacaatacatgagggcagggacaaatgtctgcctgtgagatgaggaagttttcatggaggaaaaacctcatgacccatgtcccaaaggacaagtgggattctagaagtagaaaggcgatgaagtaataaattcatcacaagatttgaaagctgggatgtttcagggagtggcactagagatgaagacattggaaggggaatagtgagaaataaagcaggctgaaatcagagcccaccttactccacacctcattaaggagtctgaactttattttgtgggtaaaggtgaggtcaccagaggatttgaacaggtgaatggcatgttccctgatgaatcctttttcatctatagcataccttaaaatatattaattcaaacctttccccagtcctctcacatttgggtttcaacttatataaccaaaatattgaggagggtgtggtttaaggtctaatttctaactagtaagaccccactattcataaattggaaatcatcaaaatttaaaatctttgttcctaaaaaggggcaccatcaagaaaatgaaaggacatgtcagaatccaagaaaatttttgcaaatcatacagctgataaggcacttgaatctagaatacatgaacaacttttataacaccaataaaaagacaacccattaaaaaacgggcagagcatttgaatggacatttctccaaagattacacatacaaatgttcaccaaccacatgaaaagatgctcaacatcattagccattagggaaacacagatgactagaatcaaaaagtcagagagtaacaagtgttggcaagaatgtggagaatttagaaccttcatatactcttggtgaataccgtaaaatggtgcagctgctttggagaagtctggccattcctccaatagttaaatatagagttaccatacaacccatcgattacattcctaggtaaatactcaggagaaatgaaaacgtatgttcacagcattattcataatagccaaaaaggaaaaacacccaaatgttcatcaactgatgaatggataaacaaaatacggcatatccaaacaatggaatattatttgaccattaaaaaaaaaaaatgaagtactatacaatactaccacacatataaaccttgaaaatatgctaaataagggcaagacacaaaagaccacatagtgtatgattccatttacatgaaacgggaggacttctaaggggtatggggtttctttttgggggggatgaaaatgttctaaaattgactgtggtgacagctgcacaactctgtgaatataccaaaaaccacagaactgtacactttaaacgggtgaactgtacagtatgtctcaatgaagctgttataaaacaaaaaaagttccattctgcactctagaaatacaaagtactcagaaaggagtacagaatcttgttcactcactttaaaggatctgaactagggcaaagaaaacccagagagattctattacttaacattctaggtactaggtcatactgaaatattcatgaagaattctgttttaatacagaaaaggtatcttaagtttaaaaagacatacaagtgtcagaaaagagttttcataattcaaggagacagtaacacagagaagtcataaatggaaaacaagcttaagaggttttatcacatggatttgtaccttgaaaatgcaagtagctctcaaatttattattgccccacccctggaaaagaggtcaaaggtaaaacagaccaattaataatatgtttctaaagtaccagtttgtgacaaatcaaaatatgagaaattaaaattttgccatcataaagaagagactcgtcgacatacccacttatataactaagaattgatattcatccttttgaacattccatctcatagtcgttagagtgactctcttcctcatggttggagtggatcccagaagtgacagataagttaaacataaaacttttatcaaaaaatccaacggtgtttaaaaaaatgctattcactgacaccgaatctaatcctaaactatatataaataagtataaatgctgattagcacaatctgcaggcaaagtaacaaaggatcatgaaaaagtcaatattgtgtgcagttatgtttcatcggtatgtatctattaaaattcatcaggctttaatgtaccttccacaagtaatcaaaataaatatggacaagataggttctatatttgtcaaaaatgtgtgctcctgacgtttataccaaatctttgtccaatcctcagtacacacgactaacctccaccacgaaacactgcacttcaagacctaaggtacaacacaattctcagttttatttcacttttttccctacttatttatgcgatttctcagatccaatgtttactattatgcttcatagccaaacattatgactgtgaaacatacctccaaaccaaaaatactagtttccttaaatcatctgaaatgtatagaaccaagtccaaaatagattttgcacatttcttcagttttacagggaatgcagaaagtgaattaatattaaacaggtatctatttgccttcacaactgaacagacggtacaaagcaactgcttatacttaatcatgtttctgtctattccagcaggccctggtgtcaggagaacgttctgccagataaggacaatgagatgcattattatatagagtgactaagagccctacaagtactgttttagaatgtaatcccaggcagaaaggctgcggtaagagggcctaatattttgtggtaactatttccaaaagtaaatatattcgccacccaggaccagtttattaaacgcgcactacattcaattcttttcaaatgtcttataggagggaaaagcctttgtatcttaccatgccgggggaaatgaacaacttgcaatttgcttcgcactctgaatcccacgtttgcaacatgtagagcaagcactttagacaccacaaaacaagggcagcctacattacggccaaatataggatgtgtttctaaatcgtgatgcagtaaagcctacgattccttttccagcgttcaaaatcctttgaacactcccaaaaaaggatgccagggccagcgcctccctccaagaggaagcccctttcttctcagctctcaccgcagcctgccacttcccccaacacattcaaatcatttgagagacggagagctggggagcgtgcgccggtggggacaggcgggagagctcggtttctgcattcccaccctccacgtctgacctcatcctcagtcatttcggcgcagcggggccccacctgcacctcgctcctttttactgcgtccctcgccagctgccccgctattagggaaacacacctctgaatcacccagttcactcggacaccctgggcccccgatccgacagccttcctgcttcgttcctcccctcccaacccccagccagtcccagccctctgctcccttggccgggctcagcctcttcccaagccgcccccacccacattactccagctccagctctgccccgccccgcctgacccccaaccgagatctgcagggcccagagctggtctcgcacccaaagccaggaaacccgcaggccaggcggccgccctcgcccctcccgacgcagggcccagctcgccccggccccacgtgagcccggcccctacccgcccccacccactcgttccctggggcggcccaaacccagtccccaggcctggagcccccgggctctacgcctcgcccgaagcagcccttccctcccagcacctcgcccaagcaggcgatccctgacccctaaaagccttccctgggcagcctcgtcccacctcggcccgcggctccgcacccggccaggagcgttccggacctcgaaagcctcctccccacagggaccctgcttcacgctccccacgccacctggttcggtccccaactccctttccccgagcccccgacagcagcccccggccctaaccccttgcaacccagcccgtgaacccgcgccccgcgcgcccacccagcactgtcccctccacctagccctgcccctcgccccgccggctcctgtcaggcggcgcaggcacatgctcagaggacaggtccgcccgcccgactcgctctcaggctgcccccgccgggcgcgagccgctcacccgggccgaggtgcctgaggcgccgccgccgaagtccccgctgcaaagccgggcgaagcctccaaccgctgccgcctccagcctggcactgagcgccgtgcgggggaggggcgcgggcagccgccaccgcccccgccaccgcgcgtaggccccgcccccgcgccgcgcgggacccaaccagggctgccgggccgctgtgcgccacgcccacttccggaggggaagcccgcttcccaccccacgttccacgcctcgctacgccccctctggtcgcaccgagggatgcaggcggtgcccaagcgcacgccccgctctccagtcatctgagtggtagagggccacgcccacaggcgcctccgagcaacgcccactgctccttagaccccggagcggggttcttagagccccgcccactgacccgctaggctctgcaaggccacgtcccctggctcctcaaagattcccccagagcccctcaatacaggaacattagctcctctgagccccgcgcactgcctatccgagtccttaaaccagcctcctgcttccctaagcccggctcccctcccactgcttcagaactcgcccagcggcctcacaaagccccgccccgtcttccagaagccccgcccaaggaccgcaaccctattcctagcatctcaagccccgcccactaccccatctcaacgtttaaaccccaagccccgccccgaattcgcgaatccacgcctctggctcccgaggctccgccctggctccgtcacaccctaccaccacctcccttgaggactgccgacgttccagccctccctgaaccgtccattgtcacattcctagtgcagagtggccgcccctgggctgggccacacccacgtaaccccaaagagggcccgtgattgaccccatttcgcaggtgagggaatggaaacttcagggttcctcccttcctttccctggccagagtcccttaataactcggcggcccaggcctgaaagtcggagcacgggaatttgagcctcagctctgcggccgtcagactgtgtgacctgggacagttctcttacctctttgggcctgagtcccctaatcttcagcatgaagaagttgtcctgttaatagctaaagtccctttctgaaacaccaagctctgaaataccgagatttgaggaaacagagcctggggaaccgaaccgactgtggggtagggctatttacttcccaaagcaaggcatctttgccattcacagggggattttttattttaagcgtcagcctcagaaacgtgtgttatttaaatcaagcttgacctgaactaagacagctatcacagcaaattatttatcctctctaagggtcagtttctttatctgtaaaatggggataacagcccctccctcacagggttccatgagatcatattagcagccatgatcgtggcattactttttgccattaaaaggaatggcaaaaaccgcgattacttttgcaccaggataatagtaatatacttagaagagttcctggcttgtgataaacgctcgacagtacctgttgctgctactgctgggactcaacaaaatgaaaggatgggttttattttgccttcaagcagccactccta

SEQ ID NO: 121 - DNA, 151836 bp, Homo sapiens
  source 1..151836: mol_type = genomic DNA
tcccagcactttgggaggccgaggcgggtggatcacgaggtcaggagttcgagaccagcctggccaatacggtgaaaccccgtctctaataaaaataaaaaattagccgggcgtggtagcgcgttcctgtagtcccagatcctcggggggctgaggcagaagaatcgcttgaatccaggaggcggaggttgcagtgagccgagatcgcgccactgcactccagcctgggcgacagagtgagactactccggtctcaaaaaaaaaaaaaaaaaaaaaattgcacaatgacccacaaagcacttcctggaggctggttactctattattattgctccaatctagacactggtctcccggaaggcaggcatcccatctcctctctgttcccccagcactttccacagagcaggtgctcatatatgacgttgccttcgctgtccaggtgaattgcaccggtaattaccgtggagcaggaagccagcacttccgggcttgccaggctgtcctgcttggagaacccctctgcttccacctctgctaactcctcccctccaccctctccgcggttctgtatctgcggaaaccggttctgctcaggtgcttgggagggagactcctttctcaagacttgcgaggtcaccttcaggtgactgtccctcaaatctccgcagcagctccaggacacactgtgccccgagtcaggattggatcaacacacaggacgcacctgtgttatcactccaccagtagagcggcactcagtggtagtgtagacagtcctagggcagggcagcttctataacaagaggttccttagggagctagcggccgagtggaaagagcgggaggaacggctcgggcaggcaggtcctgtgctgtggtctaagtcacttcccacgtccgtcccactctgatcgtcagtttcctcctctgcaaaactcactaaggcggccttcgggcaagtcatcgcggcgggaattagattcgaaagagtgcttacacaaatccgtctggccaccctgtgccccgggccagcgcgaggtgggggtgcgggcagggctcccgggcttgcggctgccacgcccctcccagcccgccgcgccacactcacggcccacgggccgactttgcgagcctccagggggcgaacccgaccgccttctttgcccgcgcagcgcctcggccgtccagcctgtgacttcaccagcgtccccgggccagcgggacacccgagagcccggggcgccgcccgttctcccagccggcaggtgccgggagccagcctcgcccagccgcgtggcgtccgcaggcccgaaggggttaaggccgcggacccgggcgcccgtccggactccgggagcagcggtgcccggcggccggcgatcgagcgggaggctcggggcacggccgctggcgggctgcgcttcctcctcctcctccctccgcctcctcctttgtagcgagttcccggcccctcttcctccccccgccccccagcccgggccctctccctctctccctttcttcctgcctcgccttcctgcggcgaaggaggctcatctattataaatgcacattcggggctgacatcagcgacgagcggcgggcgagcgccgacgagcggtccctgcgcgctgcccgcccggagcgcagcccccaggctcggccgagccgccggcggggcgcggggagcgagccgggagctgccggacccccttccgccgccgccccgggccgccgccgccgcccccgcacgccgcgcccgcgcccccgctccgccgcggagtttctgcatgactgtcacaaaggtaagcgccgctcgcccgccgcgcccgggacccgccggcgcctgcatcccccgggctaggctgcggggggcgcgggggtgtgggtgtggggagggggcgccggtgccgggaaggtgcggcgcgcgcctctcttgctgccggatccgctcgagtcactccggcccccaaggactgcggaggccagggggaggatgccgctctggcagccccggcggtttggccaacatccctccgcgcccggcccaaccccgggactgcatttttaacccttgtttgggatgctgcatttttaacccctggagagctgggctgggcggctagcggtgtccctccagggagtgcgcggcgggaagcgtcgctggcaggggctggtgctgagcagtgggtgtggggatgggcctgccgccccgaggaggccagcggaggggaaaccccaccccacctgccagcctctgccgcccatgccgggagcgctggctccactccaaagccactctgtgcagaaggcgctgcccagtcccgggagccgctaccagagacagggcaggtccaggtggttggcttgaagatgtggggagggaatgtgacaggggaagcaaaggtgggcatcttggcagcccccatattggaggatgattgttgggccttgtcataggggcccacgtttattggagagacttcaggggcttcctagttgtagggaggaaagagttaagaggaaagatgatggggcagtggaaagtgccagggtcaagggaccagggagacctgagttcaatcccagctctatcccagatcccctggatgaccttggtcggggaggggtccactttgggcctcagtttcttcttgtgtgctgtgagggtgataatatgggtcctgggttgtgacaggctgttaaagaaccaataacatcaagggtgtgaacccacactcttcagagagatctgtctgggtactgagctcacagtctggcggtggcctcgggcttggccgtccattcaagggccagactccaccctttccagctgcccagctgggtcccagaattggggagctggaggccaaagtgggaccggcagcccagagtggggtcagatggagggtcagagcagtggggccagatggagggttggggtgcaagtgatggaggtggggtggttttggctccttctggtaagccagggcctacccttgccctcctgaggtctgccccaagactgaatgtttgtgcggattcttgggcccaactccaaactttgccattggccctggttctgggacttgggagcattgtgagaagatgaacttgagggtgcaggggcttcctcagctctggctacttctggcagggctgttgtggcccacctggggtaagatgcttagggttttgaaatgatgcaaatgctattcagctgggagggatattaaggttattaatgtcaaagatgcaagcaggctgggacagaggagtaatggatgggcccggctagagagagaaagggtgtgaggttttaataatagcgctgaggattaactcagcgcctcccctgtgtctctttttgtgcgcgagctcatgcagccttccttccctggaggcctgcaaggaaggtgtgttcagttctctttaacagtggaaggaactgaggctcagagaggtgaaatgacttgcctgaggtcacacagcatgtatgtggcagagctggggtttgccctcaagtctgtctcaatctatggccagtgatctttgcactgctctgcatcgttgggcatcctggctactgggggacttccatggtagaggagcactgcttggagacctgaaccttgaagcagggatgggacagggagtccatgaaagtgggtgcttacctgttaagcccactggcaggcctagcttcttggtatccagtaactattcaacactcctccacccccatacccagcccccaacaaaccctccatgtcgctcacctcctgctctaaccaatgtggctttggcttaagcaagctcaggggattaaataaaatccccaccttaaccctatcttctctccccttgctggcccttcacagaccagcgtgttcttgtggggaacagagagcaagagggatgcaggaaaggcactggggactgctttgctgtctacaagcccgctggtagtagctcttccagtaccatagggaaagccaccatgctctggaagtctgaaggcctggcccctagtcctaaattagccaccaacaggctgtgtgaccttggaccagtcacttccatccttgggcctctgtttttctatttgtcaaatgtaagacttggttccaatgatctctagggcctcttctgctgagccttggtgcagcttcagttctggcaagaaagtcacctctgatggagattgggagactctttgttctctgaggggtggtctgtttacaagacagatatgaaggagaaccctaaagagggtgtgagaggtaggatcgctgctgacacactgggagcggtaggtaggggaggaaatgggttcgagagtgagctcccagggcagtgtctagggctctagccttctctgctgctgcttctccaggcagagggtcatggctgggtcccaacttcctgccccttggacgaatgccttagtccttgtatcaggtcccctcagggcagagtcctctgggccagggttaggtatggactgcaggagctctgagctcagagaggcctggcaagtggagaagaggaaagcagatggcaagttgctagatcctcagtagcacttctgtagaggaggtgagcctgttttccattttccgcctctctttcatacatccccttgcccccttaaccatgaggcacagctgctaaagctgccggcaaaccctgtggtttctgaaggactcctgccctaactagccttaggaacacagagccccggagaacttctagccctgtggcatttctcctggctatgttttaaactttatttgattgtatgtaatttagtaagttaccttactttctttataggatgagaaagagaagaaagccagaaaaagggaagaaagagtggagggaaggaaggctctgatgcagggccctgagcatgcacaggaggtcaaggtgctgcctcctctcagtccaacgtgcttcctagggcagctcggggcgagggagccaaggctgctttccctgagacgagtagctccagctgattttattcttcaggttcttctgactgctttgtataattttcttgttctgttccatctcagtcatgtaccagactagcagtgcttctccagttctaaatatctgtttctacattgctatcaactggaaaagcagaggacaaggtacattaatagagtcgtgtgtaaagtacaagttaatgggctataagaaaacctgtgagctaaagtctaggcccttgcaacccgctttgtactgctcagaggccctttagggtgatttcctggctgctggctgtgatgtgacccagaggtgggtcttccaggtaagggaggaggtggcttatagtgaccaggctcccctattttgaggtgtgctgtgttaagttagacgctagtgagctgaatgctttttaccttcctgagcctggctcaggggggtcagcggtccaggagcaaagtaccctgagcagcacaattgcctgctgcaccttagaaggccttaggagagggagtgtgggaaaagagaagacctttcatgccaacatgctcctccctgctaagcagatagattgtaggtccgtgggcagcacgatcaactgtgccctggcccctctttctgcaggcagccttccctctcctgcctcagctccagcagggcacagcctgctgataagagccagtggctcctgctgaatgtgaaaggactgaggatgatgttatcctgcccaggtaatagcaggcctgcattttccaaagatcatgtgtctctagggcccctacagagtcacccataggagaataaaattttggagcgggcaaatcacccaaccctttcccttgagaaatgagggaactgagacgctgggagcagaagttgtaacttgcccaaagtcattcagtaagtttgaggctggaggggctggcacctcggtcctgactcatggtcagtgctctttccacccggctgccctggcaaggggtcctggggcattctgagcaggcacaaatgttttggccccactccacttaccccactgcatcgccccttcctgtcctgctggtgcctggatttccctctgtgggacaccatctgccctagatggaagaagcattgcgggagtgggaggagggacaggatgtggggcaggggagcaaagtccataggagccttgctatacctacagtcagatggcgagggggattatgaggcccctctgcctccagttccctgacgcagaatctaggtacccaggagatacctgaacctccagacattctacatcccagcacctcgttcctgtctgggtctccctgggagaggaagtaagagagccagcacctcaggaagccttggtgaagaggaagcgggggtaccagcacagacccagctcccgggtgggagcccacttgcgggtgggcaagggctctgcctgctctgcccacacacccattatgcctcctctcccttcccggccttcttccagatatccagcattctcatgctgggaggtgtgcggctagcagtcattcgttcatttagccagcaccctctgagcacctactctgggccaggccctgtgtgaggcattaggaaaacagtggcattagccacagtccctgggatccaggaccttagaggagaaggacatggaaaggccaaagccttgagttcagagtctcgaggtccagtgggcatgagccaggagacctcttgccttgcctgcatactgtaagtgcctaatgaatgcaggctctttccttccttactgtctctccctctaggcaatgaagctcactctccagaaaagcgctgtcaggtgctttcttctggactgtgcccagaggccctgtgttcccctcccccgaggcactgccaccttgacacctatggcagttcttagaggaagctgggaagggtttgaggctctccagggctcccagaatcaccccacagtggccagccctgtgaggttggcacacacttgagtttggctggttgggagtgtgggcgctggctgggccaatgtcctggcagctcagggatggagtgagtttttccacttctctcccaggccagctagctgaagcagacacagcctccgccagggccagggctggtggagtctcggctcctggcacccgggcagccctgactctgatttggatatgcctggccacagagcttatctggtgtccaggagatgagaacgtgtgcagattctctctgcgcccagccctgtctccttccctcttttcctgatcagccccattgggttcccattccttcccctgtaggccctgcaggctcaggcccagggtcctggagcaccctgcagcctggggagcttggggcagctggcatggggcaggccttgccagggaaggacagatgcaaatccagtggcttccacatgaaaagtagctgtttagaatgagcctctcctttgtgggcctggagtgcgggaccagctgctaaggaggcacaagtggggtgggggtggggagtgggggagaagccaccaccgcccttcctcatccctcctttttgcccccgcagaggcccctggagggactttgtaattggtttctggctggcaacctccttccaattaattaatgtagcaatgggaggctcccaggtttgctcaggctgtctttcgtacagaatacatacatgggttacttccctgaatcccatcagctctgtcatggtggggacggtcccctctatttagggacggataaacagagtgtctgagtggagagatgaccacaccctggtcccagagctaatgtgggtcagaggcgggatgcacgcccagatcttctggctttgagccagaaccttttcaatccgatcacataatggtccacaacccatgaagattaatcaccatcatcatgataataacagttattaagcaggcgttgggcacgcatgatcgcatttactctgtacaaccatggggtagattctattatccatcccattttctagaggaggagagtgaggcttagtgagagtaggtgaacggctcaaggtcacaggttgaatgaatgggtggggagcagggatttgtacctgggctgtctgactccagagaacactttcatctcacttccaggcctttggtcctggggcatgatcgtactctgcttccactccccaccaaccccccacctacaacacagtgggctattgtctgttgtgtttgtggccctgccactgaggatgtgcaggacaaatgctggttgccttgagggtgatgcccatggttgtgtcctgcttagatttgcctgtggtctttactggagctaggagtcatgtaaatgattcggggaagggtgctgggggaggagggtgtcctatacatggtgtttgacatcagattgggctgcttgggtagggcattcagccgagggcagaacaaagtatgacagaggcagagccgccttctccatttccatgaggctagcttggttcagagaacgcaggtccctggtccaggcctgcagcccttacgaagcagccttttctcgagttagcccctgatgatttggggttccactggctaggaatgctggctttgaagtcaaacacatggcagtctgtcatttacttgctgtgtattcttgggcaagttgcctcacctctctgaacatctgtttcctcatccattcattgggattgataatagtaacaatcctttactattaaggattgttattaagataaagtgagccgatccatgtgaagcacttaccatatgcctgacatgtagtgttagctgttattctcaggaagacagaaaattaatgagtgtcctggggcttatgaaatgagcagtacagggaactctgggaatagcagggggcctgacctagtcagagggatgaggaagtgactttaagttgagtcatgaaggatgagtaggaggtagcaggtgaaaggaggggagctgaggagggagcaacaggccggggatgaatgggcaaacgtcaggagtcaaaagccacggaccttgatcacttcctgcatgctggacattgatgagagcatggtacaagtatccactcatttaatcctcagagtgacatcatggcataggttactgttatcatccctgctttacagataaggacacaggcacagagaagctaagtcacctgtaaaaggtggcccagtgaggcaggatgaggctggtccagacccggacctccggattctggcctctttccttcccgctgcctgctgcttggtgatagggagggtggcctgaccctggctgcttctaaaactgacccaggcaagggggtgtggaagtgccaagttcagttgcctaccccgatgcctcacggagcctccttgggctgtgtaaagtggccagaggccctcctggctctcaggcaggagggagaagtcatttatttttccaaaaggaaactttgctctggcaggaaattttccaccttatatttttagtgggctcaattatgaccatttttgttctttaaatctttcttattatctatattgggccttggtctttaaagtcaaactatagggagatatgtatacacacacacacacacacacacacacacacacacacacacacacacaatttttttctaaagtgttaaaagtccacaccaatagtcccagctactcaggaggctgaggcaggagatcatcctgggcaacgtagtgagaccccatctctaaaacaaacaaacaaaaaaaaccccctaagtgtctgcagtttggtgtctgctctgtccgagctcagagaaggtggatgttttacatggtgttcatgccacaggcttaaacttactgtcccctgtatgagataagtgtcaacacccctggaggctctggctgcccagagcggtggtgtgtggaggctcaccctgggtaggtgctcatgctaattgctgggaagcctccatgatcagtatttaactccggagatgtctgaggtcatctgggccagcactctgcctgtacggcactctacactttttaggaatatcacaatgattcctaattttaatttagattcgtttaagaaataccaatttaatagtagtcagttctcagcctttcaccaggtgctaggcccctgctttcaagggaccaacagacaataacaataacaataataatagaagcggctaacccttccggagcacttagtttatgccaagcatatacaatatgttttatatgtattaattcatttaagcttcatgacagcctatgaagtctgtgctattattatccccctttctatggttgcagaaatggaggtccagggaaggaagggaggtaacttttacagtgttcccacagccagtcagggactcagcctgcctcgcaggccttctgtcttgccactttgtcaggctggtgggaatgacccggaaatatgtggtccagagcatgggacctggaggcagaagacccaggcctcgctcttgcctctgctccttactgtgtgaccttgggctagtccctggatgtctctgagcgtctgtgaaaatgaagttagtagtctatctctgtagggtgctctaatatttaagtaacatggaaagatgtaaataaggtgctttgtagatgtcatggcaggaaatggtttattgtgatgtctaatctgtgcccactcctttcctcttcctcaccagtatttcaaggccctcagatttaggcagttccttccaatagctagcccacttctcccctgctgtagtccttatttcagaattgattcatactctgtgggtggaagagaaaagttcatctcttccaaacagcctctatctgtttttactctgtcaggctagtttggtgcagatgaaaagttgcttttctctcttcctgttctgtctattttggctgttttaatatgcttgggacaaataatctggctataaaaatgtggtgtcctgctttcatttgaaaagtgagccaaataaagcatccaaaccttgatctgtattatcccggctctctgtagatcagagctccctgtggaaggcgagggaaggtgggtcccagagcacagtcctacctgggtccctgggcagaaagaccaggttcccactgtcaaatgaccttgatctttgctccagatacctcccgatgcccccagcgctcagacctgcttttcctttaggtttatggaaaggaatagcctctactagcttgaggcatttgcagcaaatcatttaaacaccttgagtttgatttcagaactaacagttttataatctggaatctggtagaatccaggacgtggaacggctgatggaaagaaaggtgttggtggaaggggacaaagggatttaattcctgaggatttttatttaactcctgaaaaattgctggttatgcctgccctgctgacctccaggtgaaagaccagcttgcaaaaatgcatggggaaatttgggattccgagaaatttggaattctgggaaaggggatttctgcatacctgagtggccaactgataactttatcatcacaaatctttcttctagagaccctgagtctgccttcctgccttactcattaaaagatctgggaacaaactcaagttattatggattgaggctgtttcagggcttgagctgttctgttaaactgaccttttcagggttcggatccacattaatttctcaatccttggagttcctgtagcatgtgatccctggtataccagccagcaggtaaaggcctaatgtgccttgtttgctgattatcttatgagcatgatctttggctccctaacttgtgagcttgctgaagctagagattaggtctgattctttttagtagctttcacagcattcatcaaagggctatgcatgccagttagagtgtgttgtggatttttcgaataccaggtatagacatataagatttggcaggatttggagcaaacctaaaacattccctgttgctgcttggacaaaatctctactgttagagatctgtggactgctacagccggaagggactttaaagatgtacagtagaaacgcccattttgcagaggagaaaactaaagccctagaaagttttcccaagggggtataggaaagatgtggctgagtgggaactggggctcccccaagttactgctcaggttgggttttccaattctgtgggtttttttctaggcttctagtagttgcccgatgttggcaggccaaggactgattcaaaagtggggaatgggagaaagttccagaaaggagactttgagaacttaacctagatgggaggaggcacctggttggagagacttggctccccaagtgaccaactaggagcgccctgaccagaggcctggtttggcagtggcagaggcagagggagcaacttcggagccctttctgctcaaccatcaggctgcggctgcccaggcctggcagtgcatgccctacatgcctggctgcccccctggcctccacagtggcccgtgacccccggctctccctcctggaagctggccgtcctggcacactgggctgccagcaatctttccctcctttgtttctctgaaaccatgagaagggccgctgagttgggagcctgggttgctaagagctttcctcaggccagaccatatcaccagcttgagaagtctcctggccaagatttccctggaactctggctcagagggagggagagtgggtggagggaaggggagagggtactcaggagccacaaacaaagctgcccctctgcaccaccgcccccctctcccaggaccagagtgtaggagcagcctgggagccacaaactcagtgggcctttgctttttgaagagccctgggaacaatggaacaacaaagctcttcggaggctgcccccccatgcccagccctgcacttctgttctctcaggtacccccataactctgctgttacccccacttttcagagggggagacagcctccgagaggatggcctgccctgcttcacacagcaggaaggggcaaactgggccataacccgctggctgcaccgccccatgcacaagcaggagctgcaggccagctggcctggcagtggatggctgagggtgctgcggggccgctggtttagaaggtcctcccctaccacttcgcttagaacccactatagaattcccttcctttgggtcttttaggtgttcttaaaaatacaagtccccctgagggggtaataatgccctaagtggttgtcattgactggaccgagcctgctggaaggaaaacactagagtaggtgcaggaggggttcctgagaggcaaatgaggcaggagggagagctggttactgtaagtgagccagttttgccagggaagtgagtgtggagaggagaggacagccaagcttattctgtgttcctctccaccctggctgccctgttctcctatgcagggccggccgccttccccatccctacccttgtgcaaataaaacgaggactgagatttatttaaaaaaaatttgctgagccctgtgtgccaggccctaagcggcattgagggtgcagggatgaaccaaagcagtctctgtctccagggggatcctggtctgtggggggacacaggctgcaggactcagaaggacacatggctgcagggatgttggggaagggaggctgatgggtggaggcgtggaacagcagtgacagggacatgtgcacagaactgtgaaactatgagagacgtggctgggcaggccaaggaagctctctggaaggagagatcttccctcagtcttccagcatgagtaggcagaggcagatgaagaggcaggaaaggcattccaggttgagcgggcagcgtgaacaaaggaatggaaggggaaacatgtttggcttattctaggagagaaccagttgggtgctgctgggctggaaatggaggggctgtatgtggctggacaggcaggcaggggccatggggagctttggatgccaagccaagaagcttgagcttcattgtgtggtgttgctgggagtcctagaggggctttaagcaaaggagtgatgtgatcccattcacactttaggtggtctgtccctacccacattgccctagaggcagagaggtgagtggacattctcaaagcctatgtgcaatgaggcggggaaggggtttctgagcccctagcccagacctcctgaaggtctctccctgtgcctgggagctgggtgtcacatatgccccaccccataccctaagatgggagtcctggcctggaccactccatggtatgggcctttcccatctgcctgggctgccagatggttcgatctaagggttgagaacataggagggggcagaggaccagaagtttccttctaggaaaacgtggttatagcatggcgagaagagcactggaatgggatttcaggagctcctgcctaaaccctagccctgaccctccctggctgtgtgatcttgggttggtcacttcctcctctggttggggactgcctcacctggtttgaggctgggtgcagaagtgagcttctggatgcgagtttatgccctgatgctgcccagccttgggccctgttttaccctcttcccttccccggtgtccccagactctgcagccagtgtgtctccttctgcgccgtgtcctccaaccacacatccactccagactgccaagagttgtgacaagttcatgagacttggaggttaaggaccagagtttgagtcctgccagcttgcttgcttggaggaggtctcaacctttgtgttcattgtcatacatgtggtgtaaattccagcccttagcacacataagggaattttctgagtcagcgtctttcatgtctcttggatataccccacctgtgcttgttctgtctatttcattgggagagccctcatctgatggaattctatatccagtttttagtggttacctggggtggggataggggtagagtattaactgagatagggtatgagagaaacttctggagtgatggcggttacatgaatgcatacatgtataaaaatctgtcaaggcaaacacttaagatttgtgcactgtaggcatgttatatatattttacatctcaattaaaaataaataaatgaaaaaagattcttcccagctttctggttcaagtcccacctctctgcatctattcatatattcattcactctataaatatttgtttgtgctccagccagcccaggcatacagagatggagaggctggtctgtgtactgtacagtatgtacggaatgtacagtattctggtctgtgtactgtcatgggagctcagaagcacagaaccttcagggctcatggggatattgaccatggaggtggttctcaaccccggctgcaaatcacctggtgaggtttaaatgcctgtttccagcttcatgtatgttttagtccattttctgcttctgtaacagaataccgcagactgggtagtttataaagaacagaagtttatttggctcatggttctagagactaagaagtccaagagcattgcaccagcatctggtgagggtcatcccatggcagaggcatcacgtcatagtgagtgtgtgagacagagagaggaaattgggccaaactcattctttcatcaggagcccactcccaggataatcacattaattaatttgtgagggcagagctctcatgacttaatcccctcttaaaggccccatctcttaatactgttacattggcaattaaatttcaacatgagttttggcagagatattcaaaccgtagccatgggtgtatgacctgttcaacatttggtttaatgttctgttgtcactgtcttgaaattcttaaaaacttttgaaaaaggggacctgcaaatgaaatagttggtcctccctgtcctccttcccccagaacaatagaatcagaatctctgagaggtgggatccaggcagtcacatttcttaaaagctgagcttccattctctagcagccaggtctggatgtagccctactcctagacatttgctgaaacacaatctggagcctcgttctctagacacttgtgactgagctggaacaataagacttcacacatgagagtgtcacaagagcaattcctgggcaacagtgttagaaagctacaagggagctcagagaggaggggaagaagaccctctctgggtttgtttttttttttgcaactctgaaaagagctatcagtccagtttgtctgccccttgatagtatttccagaagtggatgagctgtgaagtgagtttgctctgaggtggcgaagtgggtgtaggacgcattgcaccatgcaaaggtcccattgtggggtgggaaggtcaaggaaggcttcatggaggaggtggcacatgagccatcctgacctgagaagggcgagagaagagaagagaagaggagaaaaggcaaaaggacaaatgcatttaagaaggggaagggctcatttgggggaaagggaggaactaggctaactggagtatgacttgagcagagagagatgtggttgggtggcacaggaaatgatagtctgaagtcagaatcccgtcagcaatggggagctgttgagtgttctggatccaagaataatgtgctccataaatgtctgaacgaataaacaaaaggggtgtttgggggagacataaaggggattggccctctaaatcgctgaggtttgcagccagaactctggtccacctggcatggaaggctctgcaccctcttccccataggtggtgcctgtctgtgcaggaacctggtgtcccctgcagtatggtccaggggcagcagtgactgaagcatccccaagaatagcagacatggaacagaccatttcctcccatttctaggaacagcaagctgtgggtggatgggtaggtggaggcgcttttggtacaagctgagctgtgctctccagctctcaccaggttccccagcccaggtgagcagccctggcaggaaggtgctatcttgtatctcccatggcctggtgaacactaattccttgggcagggtggtccctgcttggaatagaggagccccgatttctgaataaccagcagcagatctaaagcagttctgtttgtttctgtctcctgaaatatttatgcaggaatatgagaaaggggctctgtttattgaactcatcctccagggcagaagccgtggggaaagagccacttcccatgtctgcgagccaatgagcagaggtggaatttctttgggtttgaagtgagacagagcctgtgtgcttgcagaaggaagtggggtgggattcctggagaggacagaaagccctttcaacctcttgcctccagtcccaggaaagcttttcagcacatactttcctggcgaatccaaataataacaattgaaatctcagccttggttctactctgggctttgcctctatcatgctgtgtgaccttaggcaagttgttaacctctctggattgtttttttccaattctgaaaagagtgaactatcagtccagttctagctgtccgtgcagttctagctatcagtccagttctgtctgccccttgatagtattttaagagtcagttgagttgtgcagtgaagtggatttaggaagcattgtaccatgcaaagtcccaactctgcagcattcgaggccagagaactggctgagtggccagccaagtggcagcctcagctgtgacttgtggggtcaggccagagagagtactctcttgagctggaccctaccctgcctcaggttgggacaaaggggccccctccctctttcctcctccagctaagccctgctgtcctgtgtccctgagaacactggcaggatttcctcccaggaagggggacatggatgtccagtttacatccctgggagttgcagacaccagagaagcaaggcagcacttccccatgacagtgggatacgccttatcgtcagatatagaagcctgtggctccaggccctgagccatgcagcagggctcagatatccgctgtcctcctttaggggactgggatccccttccctcagttcagccccttgggcagggcttcaggggcttctcccaggggtgggttctgttctcagctctgtgactggcttggtcttcctgtttcccatggtggacttcatgagtggtaaagttaataacagttattatcactagaccaatccaaatcttaatacaaaataccatcaattaagcacctgctccatgccaggctctgtactggctcagtggacacacagaggggaccaatttccccagcctttaaggaagttgaattctgcctgggaggcagacgggcaaacaaatacggatgaagccattggctcagcattgaatgcgagtcctaaaggccgagggaccctggtgagacggagcgggcgtctgggaggaggaggtgttggagtgtggctctgaacctaggtgagggaaggagcagcgtgagcagaggccagggcagcgacgccgtggggtgctcccgagccacgagggtgcccagtgaggtttgagtgtggagggtcgggggctgggaaggtgatgagggctcaggggtggcttgcggggaggtgggagttgtgcaggagtgctgttcctgggcccatgtgtatcagtccatccatgaagagccttttagtagtaaagagatgcgacgaagtcattagattccacaacaataaatcttcattaagcatgcactgtgcccgtgaccctaggtgatgggacagtccacatgggtgaataaaacaggaacagtccctgccctcagggacaggcccaggaggatggggagacaggacagaacacaatcctgacatcagtggtagaaatgctgttaaagaaaatacaggggcatggggggtagggggtgggggttgtgagaaggggatcccctgtggaatgaaggggggatagagccccatgggatctagggggatctttctggctgagagagaagcaattttgaggctccagcaggagcctgcctgccacggaaagcacagtgagcaggcctggtctggtgggaaaggagattgaaggggaaggtgggttctggctcccataaggctggcctgtgctagctgctcactaatacttctcgactgactgggaggacagataggtgaaggataaggctggaggcctggagcccagcagccatgttgaggtgatgaggatggagccagggcagaggcagcaggcacagggaagatgcatcttcaggccttggggatggtgtgggaggagaggggtacaacacagcaggcagagtcttcccggagctcctgggagaagatccagatccacaaacccacggggagaaatggccgcgcatcacgcagagcactccccacgccccttcccacaggccaccccagccactctggcctcctgacctggggcccatggagcccatcctgtggctctcctcctgcctgccttctggagggtgctccaaactgggtcttgtcctcctgcagggccagcagggctccgcagaagtcctcagggaccgccctcccctgccagcctcacctcgagtccaacctcattagtattttgagcagaagcatatatatctttttttttttttcctgcagggaattggtggcctgctcatttcaaattgcgtaaaaccaaagagcaattaagaggcacagccttctcgggtcaaggagaaatgacagagagaggtggctttgctcgcctggctgctggcacatcttttccaggctggcctggttttggggtgacagggaggggagatgctgtgggattttaattcaccagcaacaaaatactaacgagtaggacagaatcactaatgcttattcagcgcttaccatgttccaggggcagtcctaattgttttacacgcacctcatatcaccctttcaatacctaggaagcacagggagatggcttctactgttatgcccattctgtgaaactgaggctccaaggggttaagcagcatgccccaggtcacacaacggaaatggaaccagggttctattgcatccccattgtgccccagggcccatgctgttaactgcctggctgtttggcctctcaaaagcattgcatttagccaatcacttctccctaatttctgtttcccccccatcaaaaaaaaaaaaataaataaataaaaaataaaaaagaccaaacgaacaaaatcctccattgctatggagctcagaggcttcaccagggttactgtggtgaacaagggcagagaggaacctcgggcaaaagtccagcctgcggttcccatccttgtccctctcccagtggcctgcacagttagacccattgctcttggctggtgtggaggcatctgacccattagggggccactgtggtggtccaggcgagaggcctgagctgaccagggggatccagtgaggactgagaggagggcaggatgcagggtgacgttttggaagttgatgagtctgtgggggtgggtatgagttagaagtcagtggagaaccatggccacacagtcaagagtgatggagaacccaggagaaagaggtggcgctgatttctccaccttttcttcagatccagaccccctccaccacctggatcatccaccttgttccatagacttggctctgagagcattttcactgtttcagagaatcggatcccagaggctgaagctcagtgccctgggctctgtaggcagcccctggagaagagggcgggcagtctggctggaattggggtgtcccggctctcagggaactgagctggttcctggcccaggccatgtgggttttaggattttagcattgctaaaccctcctagaactgctgtgtgtgtgcacgtaagcgtgtgctttggtagggggtggagataaatgggaagttctgctgtctctgcttctctattttgcgtggtcagtgatttttactaatagtaaccttctggggaaaaaatgatccaagggcagcagtccaattttctctagagagtaggcctgctttctaaaaaaggactcaacctgagagaagccagaaggagttcacaccctagactagagaagccagtccctggtgagcaccagcatgcctgtctccagactccattcctgccctggagcccgcttggccttgaacgcccctctgcagcagcgtactctccccagctcctcactttggagttttaattctaccgcaaacctagctctcctctgtgccttcccatctctttgctgggcaccaaggagctgatctgctaactggactttgtttagaaatctgggggtttgtacagaaacgctgccaaaagaaagtttctgttctgtccagactctcctgaggcctggaagagtgactctgcttgcgggaagctggtggggatgggagctggggcagccatgctgtgagtctgtcctgggaacaggcccaagctgggtctggagctggtctggactaggagagtgaggctaggggttaggggatccaccagcctgtattcctagagcctgtcgccccatcctttggctcggccctgcccaaaccacttggctgggcattcaaagccttcactctctggccaccatttacctccttggcccctgcccaaaccagacactggtcggcttgctgcccccaaactcaacctctgcttttctgctccctctctacttgaaaagtctgattcctgctttcaaagcccaaagtgcgacctcctccacagagccttctctgatctctccttgctccaaactctatccttctcatgccactgctctgatgagatagttatatctgaacatgtcttgtctctcctgccagagggcaagccccatgccctgagtgggagggagcgtgtcgcgccacagatcccattgggtgctcctgctgtgcctggccctatagatgttcaattacaggtttttgaatgatgtatttatattttttgcatggatataagaatctattctgtgcatgcgtcatagcttcagccatataagatgcattcgttggcaaattcatcagagggagcagaataaagccacccaactctgtccccacaagggcctgagacggatatagggagcttattcttcctttcttcaattgccccacccccacgctgcccagacagatctgggttgcccttgaggaattctaaaggagggaatgcactctccactgcccctcagaccttccacccaagagaggcagtgccctggtgacctcatgacagtagtgtgccctccccaggctctcccctcccctgggaggctgccacatgctttccggacatccgggtctcattatgctgtgactcaaaaattaatcttgtctaattgtgctcgaggcctgagtgaattcagggactattagccaggctctgtgggcctggggtctccatggcaacgaggatgcatcataatgaactgcgtccttggagactggctaggaggcatgcccctcccaccccttggtgtggactgctgctgctgtccctgctgcttggggtaggccccctccagaggggacctggggctggcagagggagtagagacagtttctgtgtgtagcctccagtctgtctcagtgcttcagggataaaagatacttgcagatggatgatcccacagccttattgttggctgaagatttcttcaacaaacaaacaagcctccatctaaaaaccacacacacagcacatcaaattccaatagcctaagtgctgttgttttgcaaatctttctaaaatgtgaaaattgcactcctccgtggaggcctggctccagtgtcacctcctccaggaagccttcctcaatgtttgcatctttcccagccccattctgccactgtgcttggtttgtgagccagggacatttttcagcacaatctgccaaggagtggacttccctgagtacacactatgctcccttcccaccagcagacaagctcctccagcatggataaccaccgctgccctcctctctggggtcctagacctgggtacctgtaggacttagtcggaaagacaaagcggtctttgttaacagcctctctctgaactccgtcccacccccggacccaggctggggggtcttttctgtggatgtggcttttggggccttcagatacccttgtgcccactatgaccatgggtgccgaccagtgggcagacactttgccttccctatctaaggaagagggaatgccctaaaaccaggcctttggggaagatgtggagaagaaaaggacatttgaggaaatgaaaacagtaaatgggacagccctggcccagcctccagcttcctggcccttgagcccctcagtctggtcccccacggggagacaagaagcgtgggaggaaggtgaggagggagagatgcaaacccagcaatttccccacaaccacaacaccaccttcccggctgtcctgctgattctcggtttctagaaatgaccggagagagaggaatgagtagggaggaggctgcctgtctgacttttaattaaaagggagaggacacctcctagccagcctttaaggcaggggcactcctgtggtgtgtgtgcctccctcgatggggatggggtggcatgcaggttttgtgggtgtgtgaatggttgacaggtagaggtagccattggaaaagctgtccagaaagccgcattctctcctcgctcctccacaccctctccccttagtgcagcaaacgtttcttgaacatttcttggcttgagtgccaagctctgtgccaggccctgggatgtagagatggttgagatactgccgctgggctccagggcggcaggcggggacaggatggggttggcagcactgggaggttgagggttccacccgtccctgggcctcattcagccagcatcctctgagcgttgtcaggtgctgtgcctttcggtaggcaccgaggataaaacggtaagtgtggcagaggcctcagcctgcacggagcttacagtcaagagtggtgtgaggtggggattgcggccatgagcgtgcagtgcgaggagggctaggatgagggtgcctgtgggggcctggaggagcagcagccacacagtgtcggggcatcagaaggcctgccccaggggtggcctggaagcagagatgtgaaggaagaggaggatttggccaagagaacagctaggaagcgtggctgaggtcaagggaatggctgtgtgtgcgaaggccggagaagaaatgagggctttgaggagcagaaagaagttgagtgcagctggggcttagtggtgctggggcagggcccaggcctgggagggctattgtcttagtccctctgtgctgctgtaataaaacacctgagccatttataaagaacagaaattgatttctcatagccgtggagcctgggaagtccaagatcaagtcatcagcaagttcttttgtttggcaagagctgcatcctccagagggggaggatcactgtgtcccagcatggcggaaggcagaaggcagaaggccaaacacgatgggaaggcttttttttttttttttttaaataaatgccttaatcccattcaccagggaggagccctcatggcctaatcacctctgaaaggatctgcctcgaatactatcacattggcaccgtctgagttctggtggagacacattcaaatcacagcagccatcataatcccattcgcaaggaccacggacttggtcctgaagtgggagtggggggaactgctgactggctttattccggggaatgacactaggtttatgttttaaaagaccactctgacatgtatttttttgattagtagaaataattttttttaaacactcttggtgctgtggaagggaagaattgggagacaggaagggttttgccatgattgagatatttggtcctgcccaaattaggggctgatcacacacacacacacacacacacacacacacacacacacacacgttttacctacatgttgtaattcactttgatatggaaattttaggtcactaagagagagatgagcaaaaagcgctcttgctgtgtctttaaccgcctctccctatcgtgtactatgttaaacaggatccagctgtaacctccacggttcccagggctctgatcagcctggctggtgggagcccccatagctctgcctgctctggggtttcccttccgtttattgcccccccttgaggtagggatgatagatgtgaggtgtgactgccagtttcatagttctctacatcagtgaaggaggttctgtgcaatgtgcaacacccactttcttcctgagaacactaagaagcaattcctctctgttttctaataaaaatgtctcgtggaagcaagcctgtttcctgggaaaagagggactgcctgtacgaatcttgcaagcacacgtgtttccctggttgggatatatataattttgttttcttggggcagggggtggacacacagctttgcaatcccttgcctagaaacagcttccacactggcttaacaccatctgtttcccctgagcaggaaggtgtcaaagagccccctgctcaaggatgggtctgtcaacggtctgttaggataggaggtgagagacattggttgcctggggtgagagagtaagacagatggagagagaagtgggtaggttggctggaattaggatgcagaattgtccactgtgtcttacacgccatggaagtcccagggctaacacagtacgtggtcgcagtaggtgcttactaaactagttgctggatgactgtgttgtcaaacaaataaatgaattgaatgaatgaacgagtggatggatgggagggtatgcacagatgagcgaaagttggcctgtaacctccaaataattattatcttaaaaaaacacacttgctaatcatactagtgtgaggcctgagacagaggagccttcgtggaggacaaactgcagcaacagtgcgaggtcatcagcagatgtcaaggagtccatgtgtttagggcagagttagggtgacatggtgctgtgggctgaattgtatccccctaattcatatgttgaagccctaacccccagtgtgtttggagacagggcctttaaagagataattcagggtaaatgaggtcataaaggcagagccctggcccagtaggactggtgtccttataagaaaatagacaccagagagctcactctctccgcatctgcacagaggacacagcaagaagacggccgtctgcaaaccaggaagagaggcctcaccagaaaccaaccctgctggaccttgatgttggacttacagcctccagaactgtacgaaataaatatctgttgtttaagcccccagcctgtggcattctgttatggcagcctgagcaggctaatacataggggatgctggatctgagtttggagctcaaggggcagaacatggggaagagtgccatgttgtagaattcagaagggcagctggtctccttcagaggctcatactagaacatgtgcaccaggaggttcagcataagagcccaggctgtggagtcaagactgctggggtccaaattcttaccccatagaagcgttgtgagcactgagtgtatttcatacacagaaagcatttggcacagagcccggcacacagtcagcactccacaggcatgagccgcccctcgtcgttcttatcacgttcgcttgtcagtattgtcactctgggcacccccttcccttgacgcatactccagggctccagcattgctcagagtttttgggaccttcctgagagcagctctcagtagcagcttctaccatcaggaaattggttccattcttcatggtcagcccccacccccaaaccgcctttcctaccacgagcagaacaagtgtgttcctgaatgatttgggattatggctgaggagaggaaccctattaacaagggcaaagattgccatcactgaggatagccctaagaatgccttgccagtcctaagcagaatttcataccaggaaattaaaaaggtgtggttttttttttaaaaggcgactttatctcagcagcatggctagaatatgtgtgtgtcctccccagaggaccactctggaaaggctggagtcctctctatgtataagttgtgatttaaaaaaaaaaacctcccttctgtgtaaattcagccccaattcctcatcccagcattccaacaatcagaaatcacaccttctgagaacctatggaaagatgggattatgggtgcgtttgtttacatggttatacttttctgtttgcctttctagattgtgcattttttactttaataattaggagaaaattaagcaagctgttaagaagttttgaggctgggcatggtggctcacgcctgtaattccagcactttgggaggccaaggcgggctgatcacgaggtcaggagttcaagaccaatctggccaacatagtgaaaccctgtgtctactaaaaacacaaaaattagccaggcatggtggcacacacctgtaatcccagctactcaggagactgaggcaggagaatcgcttgaacctgggaggcagaggttgtggtgagctgagatcatgccactacactccagtctgggcaacagagcgagactccgtctcaaggaaaaaaaaaaaaaaagaagttttgaaaagaaaaacttcaatctcccagctgcttagcactgtcctgggtcctatggcagtgtcgtccaaagttgtataagccattatcaaagacacataaagtaaagtgggatcacccatttggagagcaatttggcaacagacaccacaagccataaaaatgtccatatcctgtgacctagtaatcccgcttctgggaacctgtccaaaggaaataatccaaaggcggggaaaaactctatgcatcaagatgctcatcacggcattatttataacaatgaaacattgggaacaaaataaaggcctaatggtatgagactggctgaataaattaggaagcattgattcaatggaatattctgcagccgttaaaaattataataccaaaatgatatggcagtgtgggaaaatattcgtgctaagtgaaaaaggtgggacataaagttttatgcatatcatgattgtaactgtgtaaaaattatttggaaagtacagatgcttcaagactggaaagtgaagggagaatggacaggacctagaagtgggctgggaggagtcacagagggctcttgggtttttttttttttttttttttttttttttgagatggagtctcgctgtgtcgcccaggcgggagtgcagtggcgcaatatctcagctcactgcaacctccacctcccgggttcaagcaattctcctgccttggcctcctgagtatctgtgattacaggcacccgccaccacactcagctaatttttgtatttttagtagagacgggggtttcaccatgttggtcaggcaggtctcaaactcctgaacttgtgattcgcccaccttgacctcccaaagtgctgggattatagcagtgagccacagcgcccggccggctcttgggttttgagggtgagcagctgggtgggtgaagcctcgtttactgaaagtcatggtggcagagaagcagattggggtggggagaagaccagtagtttagctctaccatgttaggtcaaaggtgactgcaagaatccaaaaggagggtccaatggtcaaaaaagaggcctagaccaggagtgggaattttggagccatcagcctgtagatagtgtttaaagccctaagcatgaatgacctcaggcaaagggagttagggtggtggggcttagccaagcaagcatattagaatcacctggagatccctccaggccagtgaatcatggcctctgggctgtggttgggcatcagcatttattccaagctccctggataattccagtgaatctaggactgcactcatggtccctgtgttccccagcatagggccttacatgtgggcagcatgacttatagcacatgtaagtaccgtcctgctacactgaatggtacagttgttggtcaggcgctttccttaaagtaaacattttccataccccaaattctggcacatggcctgagagaatttttgagctgcttctgagtggaagaggctgtgtagaaaatacagtttggatacagaaacattgaaaggatgaggatattttgctagctcatgggtagagtgggggcagagtatttgaaactgggacaggcacagaaaaatccagagcataactgaacacggagttatgtttcctctgatatctttggtcagcttctgatggccccagatagaggatgagtttcttgagcatggaggggtggacatggaagacattacgggacccctggagctgtttcacagggcaggcacttcgtaggtgctcaatatatcctccattgactgtggattgactcggaaccaggaaaggggcaagccagctgatcagagccttcacacccaaagctggagggcactacaagaaggagccttctccaaacatcttgagtctcccctggttttctccctggctcaccaagctcgagatagatattgggcttttgaagtaggtggaggggttagcaaggggcctcaaggattttgtgggccaggcacagaggggatagtttgtctctgttccaccatgtctggggtctctgctaggaagacctaaatgactagggtgacatctgagaatcatctggaagtgccttcacactcatgtttggtgcctggactgggatgacttgaaggctggactgggctgggactgttgactggagcatctacacatggtgtctccacatggcttgagcttcctcatggcatggccgcctcagagtagtcagatattttacatgatgacttggggctccaggagcaagtgttccaacaaacaaggaagaatgtaagatcccttatgacctagcctcagaagtcacatagggtcacttccacacccagattccactggagaggacatggaacctgcctcaaagtcttttttgtaaagagcttctttgggccaggcacggtggctcatgcctgtgatcccaacacttcaggagaccgaggtggcaggatctcttgaagccaggagtttgagaccagcctgggtgacatagcgagaacccatctctacaaaaaatttaaaaatcagccaggtgcagtgatgcgtgcttgtggtcccagctacttgggacgctgaggtgagaggattgcttgagcccagaaatttgaggttgcagtgagctaagattgtgttactacactccagcctgggtgacagagtgagaccctatctcaaaaaaaaaaaaaaaaaagatgccctcttagctctcatttttcactcctttctaagagaggtcagaccaggactccaggaacagatgccatgtgacaagaccccagggcctttatcatcttcttgtcaaaatcacatgcccttgggcatagcacctcatgaaacagggccttgggagtgaatgggagtgagggggtctacatgggctcagctgcagctgccagaccacagctttgcagaggcgtatgtcctttgacactggtgaaatgccaccaacgtgaaagaacatatcccacctttcctgctacctacctctggggcaaggtttccttcccttgcacttaggcaacccaaaccagacatggggggcctgagcacggccactgcaggcccacaggcatcctttgtgaagagctaggcaggggcccagggtggcatgatcagggcttggcctcctgtggctggctgcgcatggccagcccagacccgaacattggtggttacagtttccaggcctcctgggagaaaagccagcaaggcaagttctccctcccccacactgtggtcccctggaggacttcggcctgaaggacaactcccctggccaggccaggcagcccaagctgacccactgactggctgggagcccagccctctccctcagggagcccccatccacttcctggtattgctctgtgtgagtgtgcacgcgtgcgtgtgtgtgtgttgggggacattctgtttttcaaggacttggctctgtgcagtgaagggatctgttggagaatgatgagagacctgtgggtcagggaacatactcccctctgcttcccagttcctcctctcctagggagggaactccccatgaacaagcattcctgcatcctgaatggttggagcctcatggctttgttctccacccctcccctgcccagactcccgaatgccctttctcaggcttcccacagctggctttgaagagttatggggctccaggaggggagttgaaattccgcactctcatcctcagcatcatcattcccttccactgtgtttgctatttcagcctccatccatccgttcaacaagtgcttaccaaaactcccactgggtactaggaagagagagagagaggagacagaaagagaatgaacactcaaactcagaccctatcctcaaggtgcagcagagaggaaatcaacttggaattagaagccacatgactggagaaatgctgaggccagggcccccgggtgcctgcacggtgcactgggttccaggaaggaaggagcagcattggaactgggcctccagggatggttgggatttgggttaggcagatacgcagggagagggaaaaggattgcaggtgacaagagcaacatgagcatggggcattgtggtggtggtggttggggggatggtcacctgaaagggacacatttgctgtcaagagaatttgtcctgccccattcattgttccctgtctgagcgttatctagcaaaggagaagaggatctggtgaactgagtcacaccaggctgttagtgaccatcttatttctcccagcagggcctgtatttaagaagagggctgtggctgtgcaggctttggggcagggcatcagtttgtggtccacatcaagcatctaggtgtgaggaattgagcctctgtcccagacttgggtggagaggaaaaggaagggaaatgtctgagctccagggcaggggccttccctcccgaatccacatctcttttggagttgggggagtaaatggggttttcatctcctctttgctgctggtctcccagctccttccactgccaggcctgagcccgctgtcccctccccactgctccctcactgccattcttcttccaggacatcctgtgacttaaccaaaggcatgaaagctactgatggaaggccgttgctctggctctccaggggtgagctggggtcagcccatgccctgggactggagggctgtacagcagcctgtgagccgcgtcactgactgtgatggcaggcagggtgggctggggtaggggagcacgaagcggtctggttcagtacactagcttgacctggaatccgcatgaatcatccacattggccagctagcccatccccaggggaccctgtaattgtgcaaccagcctctcccctctacccaccctccttctcttgataaaacctggccagaaactcaggcatagagagaaaatggatgcggtgacaattccatgtgttattcagaattaactaggtgaatatcgctgagctcctcttaggtagtaggcattgaacgatgcagagatctcggggaaatgggccttatcctcagggaccctgcagccctctggttccagtgtcagcagccctcactaaatgtcaatggatgcgcccagaagaggagctaggacttcataggacgagacaggttctctagcgcctcgcctcgtttacaaagcaaatggttgaaccactccctgccctgaagtgctgcacttgcctcaaggcctagtgaagggctgggggctggcttgggccctgcatgcatccttttcctgtataccccccaatttaacatctaagaccccttgctgcctggccccaggcttgtcttcctccctgatctccagacccccttgttccaggaacaacagaccccttgctctttcgctcacatcccctccctcatacatcctctctcccctcctgttctcccatccttccatcacaaagcccctcctccagcatcctgcgcgtttaaatttgtagaaacctagtcccagactagatcctatgtctgcttctatacctgagtatatgttactcccaaggcattgatgtgttgatttcacttattaaaatggcttctcaccttgcagagtagggtactctgaggcccagtcaaataatttctgtttctgtgaggcaggtttgggaggccaatagggcatcaggccagtccagaatattcacatagagaaacagagcatcagcgtggaaatgaaccttagacacttcactgtcccttgactcccactcacaaagatgtgaactaacacccagaactgatggcaggtagcaccttccattccacaccctcgacgcagccaaggaaagaatcccagggggaaaatgaaagaagtactctgtacaaagctttgtttgtgttagcaaaacaattgggaaacatttcacgtactgaacaacagctaagctaatccaacctcagttcatcaacatgagaaaatgcgccccaccactgagccactgagcatgactcgtgggaaccagttctctatatgtacacgcatgttggagatgatggaaaagaagaatgcagagtctggagtaacacgctccatgattctcttgttccattgtatccatttgtatttatttttaaaaaataacagtgtctatttcagattgtaaaaatgatacatgttcattctggaaaatttgaaaaatcagaaaagtgtaaagatgaaattttgaaatcatactttgccctaccctcccaaggtaccaccctttgcattgggtgttttcctttcacttgtttgtttgttttttttcccctatgactgtatatgacaatttcctaccttttgcctttgatattacaacatggcatcaggagcgtttccccattgtattatttataccatattttactgattgtaatatttcaaattttttttatctctgtttggatatatcttcaactgaaagcatgtcatagttaattactacatctttttcctagatggatgtaaaataatggtcagttctacaattgattgaattagatttattaagatatggaatgtgcttcaaagtatgatttttatgcctatataatagtttattttatgaacataaacatattttattagcctcttatgttagacatttaggtttttccaattttccactttttttcttttttttttttttgagacaagatcttactctgtcacccaggctggtgtgcagtggcatgatctcagctcactgcagcctcaacctcccaggctcaagtgatcctcccacctcagcctcccaagtagctgggactagaggtgtgcaccaccatgctggctaatttttgtatttttcatagagactgggtcttgctatgttgcccagactggtctcaaactcctgggctcaagccatccacccacctccactgcccaaagtgcagaggctataggcaggagccactgcacccggcctcaactttctactttcaagaagcatccctgaacgagaaatgtgtccacactgctcattgtttatcggagtagattcccaggaatagataaaatgagacaaaacaaatgaggatcttagaagctctggatgcagatgcatgtacacattgaaagggtctaaaagtaaatatgtgaatatggaaggataaagatgggcactatacttattaagctcttattttctgtggcattctttgtgtataggctttgaaatgatgatcgtaaggacaaatcagtagtgaatgactgcatttatgtgtgagaggaggtgtgcgtgagaaggggcagagaaaggagagacagagaaaaggagaatgagaaatgtccaacactgcagaggagtcctggaatactggaatgggtgatgtggaagtgagtgctctgaggtctggggtagagcaggaaaactgagagctgttgggttgacaggaggttgtttggtaagatttttcatacccttgagttccagggagatggctgttcagcagttggagcacaaagtctagaaagagcactgaactggatggggccaggcaatctgagttcacaccttggtctgctgatgataacttgctctctaactgaccatgagctcgtgacttcacatgaagaaactcatgatcctcacgccgcagtctcctcctctgcaaatgagggaatggggcaggaagatctttaggattccaccagctctgcaaatctgtagcttgggagttcccagcagttggggagagaaaggtgacagtatctggtttgtaactgaccccagctcccttgctccttgtggctcatttttccttagggcctggaacaactttctggagttcctttcccaggtccaggacatcagagccattcactcctatgggactgcacagggaatcagtacagccaggttcaggatgacatgggactcccctctctcacttcaccaaaactcctgatggcccttcagagaaacctgctgctttctgtctttctggagaggtccagaagaggcatgtaatggaagcagcctttagtcttacatccagcttacacccagttggccaacactttatcgcatgaccacatactaggttgcaaaggcacctgggaaatgtagtttttttcctgataaaaactgagactattactatgagagagaatagaagaacagaatccagaatagaagaacgggaaatgagcaatttctgcaaaaaacaaatcttcaaacccagagcttcagggcttcaaaaatccgtgtgatggtagaagcggcatattaaaatggcttatcaaattagggttcatcaaaatagattgaacctgacttcttccccatttcaaccctctcagaacttcccttctttctctctatgtggcaaagcttgaaggaccagtcttcagtcccctggtggctggcaaggttctccctgaaggattgagaacagatttggaattgcaagcacttccttggcttgttaagaaccaatgacgcacaatgccatggacttttattttaatatacaaccagaagctgcttacagatatcctcctgaattaaacaggggttatcaaaccattgcatttgtaaacctaaattagcacatcgctaagagtttttcagggccttgaaatcaatattctactaagaggtctggcatctttgcagtccttggcaaagctcctactgtgtatacctgtatagatggctgaaactcctgaaagtcttagtaagaacactttgttctcattgtcatcttgacttagctccagtgtccaactgctgctatttttgcttttcaattataaattgctgtgagtttagcttccttattatagatttagtttgttgtgggttgttcagttagccaccagtgtgtggtacctatctgtatatttgaagcccataatttttcaatcatcaccgtgccttaaaggtgtcatcagtggaccacctgcattggaatctcttgggtgcttgttaaaatgcggattcttgggttctcacacagacctcccgaatcagaatctctgggagtggtccctagaatatatgtctctgtgccagggagaacctgtgaacacatcttaatgtgttatcagggtggttcagaaacaaatcatccagatctttattgttaaatgagttacatgtaagtccccaattctgcttctatagagatagttgcaagtggatttgttctatttaaatatattgcaaaaggaaggtgccgtattatcacataaaattgtgcatcgcttcttttacgaagtacctgggaggtgattcataatgtccctctcttattcttctttattgttttccctctaatgcatgagtttgggtagatgaggagcctccgggccagccaagattagaaaccaccattaagacacaaaggagcataccagaccctgccaagtcagtaacttgctggagaaactattttaaagaaaagacatggggactaagacaaggagagctcctgaatgactttagagggtcatgagaggaaagccccggagccctcacggtcaaggatgtgtctggaggctgtgctggaaagtgcctgggaggatttcaggactcccgggagccctctggggaagcggcttcctttccgttcctgccttgtgtgctgggggaggggctggttccagggctgcagcgggccctttatccgctcctctcagctctgactggagcgctttgtgtcctgactgtgcccctcacagcctcttagtgacgggcctgttgtccaagatggtcccgaggctggtccgggcctgcgcccatgtattatgcagcagcagctgggacaaagctcctgtgtgtggaagtcgggtggggtgggggcttgctccccacagagtcctgtttaccaggcactgggatgtgagagggtgggatggtggggatgctgtgtacaggagctgggcttctcaatgctgcctctgagaggagagaggtgagggcattgtgggtgccacagcaggctttcctggctgaagcaggagtaatggcttagttcaggttcaggacagccagagaaatgatcctccacctcccagggctcctaggccggctcaggatgcactgcttggtcattaactgggtctctctgactaaccgtgaccccagttagttagtaattccctagggcacccatgagacaggactaatgtcatcctttctaatcaaagtggacagagaatcagtcattttccctggaccaggactcttgaggggtgctgccaggtcttgctcctctctgtgtaacccggggggcctggtgtagggcaatcacacagtggatgtttgtgagatgcaaaagggttttcaaatatttgtgatgtttccattcctgagccattggctgtggcttaggcttagatgagaagcagaagtgctatggttgaaaaatgtttgtgttcttccaaaatccatgttgaaatcttaacccctaaagttattaagaggtggagcccttggggtgattggtcattaaccagtcacctttatgataaatcatgaagattaaggcctcatgaatgggattagttcacttataaaagagacccctgagaggcccttgtgtcttccaccatgtgaggatgcagctagaaggcccatcagtgaatcagaaagtgggccatcaccagacaccaaatccgtcagtgccctggtcttggacttcccaacctccagagccatgagaaataaatttatgttgttcataagccactcagtttatggtattttgctacagaagcctgaaaggactgagacaagaaagaagatcatagccttccttcctagatgcttactgcttgatagagacataaactttgcccagatgagcagggtggaggaggctgccgtttatagaacacctactgtgcgccagacctgctgggtggtttacatgcagcggctcgctccctcctcccagcaaccctgtccaacatgaagccttttctctgttctgtgatggaagaacccagctcagactggttaagtaattgcccaaggactgactctacggcctgtgcttttgtagtaaacagtataatgatgggcataattgggttgctgtcggggatatggctaatcagaattatcactggagccttctcataataatacccctgcctcttccccatcacctcagatgcacttattcgggggaaaaagggttaagaatcttgggcaggaaatgtatagctttaaaaagctctctggtcatcctagtttcttctcagaaaagtatttagcattatttttagtcttatttatagattttggaactttactatgactccaacagaaggggaaggtcttgctcaaggtcacccagcccccaccaaggtctcttgctgcccggcctgctggctttactgccatgctccactcccttaaaagcaggcagctgccctggatccagattcaaaccgcctgctgggtgccgtgggccattgtgcaagtcttccaggccgcggtcgaatgattctgacaagcggtgagtacggctgtgtcagcgcgtgggccccagcgcaagcaggcaatcccatgtcatctgcgagatctcccatgggcgagggctagcgttatcaagggccccgagagctgggtcttgcctcttgggtgcacgtggtctcatgggggagacagacaggtgtgtgcagaggatggcacagtgtgccaaactggatttggttctggaaccaaacacacacagccagattaattccaactgcatggatctgagaagccttgcagaattggagttttgttttatttggaagacatgcctgaggataaaacaaagggtttcaaaggaagaagggaaaggaaggaactaaagtttacaaacactaggtatttaacttgccttgtctcattgaattttcccaagaaccaggtatatggagagtagtaaccctggttaccagatgaggaagcagggctctgaggggtcaaaaaaatggtccaggtgttgttgggactgagacagagccaggtctgtcagccttcaagcccgtgctttccaacaacattggctttcgtgggctccagggaatgggatgagtcatatcctgacactggtggctgtggggagtgggggctggggatgggtgggaagccagaggcaatgaggaggagacaggtgcatcagccactgtggcctgtggcctcttgtctctgcagatcttggagctaggctcacaccacttttcactcttctgtgtttttcaagcacttttctgtttaatgtatcctttgtcctcccttcactggtagtctgggaaccaaaggacttggttctagtcccagttgtgctactcaccagctgtgtgaccttgagcaggtcacttgcccatactggacctccacattcccacctataaaatgaagggtagtgtgcgtgtgtgtatgtgtgtgtctgtgactatatatgtgtggttgggtgtgtgtgtgtatgcacatgttcattctcagcaaactcagtgtgaatagtaggaccagataaactctaggtctttccttgctgtgttctctcccttttgggtgggcaatgctggcatcatcactctcattttatagaagatgaaagtggagtcttaagagggagtcctgggtaagcagggactaagccatactatgctcttccactcacttctaacaacctcaacttgaaatccccagtgggtggttgtcgtcccagtgggtgagccctgtgcctgaatggggcccttagagattgtggctgaatgtgggggtttgcatttgaatcttaggctactggaatgccctagtaacatgccattctggattactagatttttcaattcacttcagtaaatatttattgagcatctactatgtcccaagcttcctactaagtgctggggacagagttgaacagagtcagtacctgccctccaggaacccagttagtgctgtggctttcagacttttttgctatagttgctagtgagaaaaatcattttgttgtgacccaatacacacacatgcatacacacacacacacacaaatacatgttatatatacaaaacaaaaccaaaggtcatgatatgcactctattttctagtcttttctactctgcttcattttttttaaatactggtagcagcctaccactttgatttcataacctactagtaggaggtgaccctccagtgtgagaaacatgggttgagcgttgcatatattacacatgttgtattacatgtaaatcatgtgctatggaaaaggagcaaaaaaatgaattaatttgggaaaatcacagaaggctcccagttcaagtggcacttgagctgagtccagatgtgtgaaaagatttgagtaaacaggaaaaggggaaaggcagccagatggaagcaacagtgtgatcaaaggctgggaggcgtgagtgcgcagctgaggagatagcactgatgtgcctggcacatgagcagtgctcttcctgggttatcacacttggttctcaataatcctataggacagggactttttagcatatttgctgccgaggcgagcacaaggcagggactttttatctcttcatgttgcaaaagaggaaaatgggactcagagaagttatgtaacttgcccaaggtcacatggctactaagtggtagagccaggatttgaattcaggcagttacattgtgatctaaatatgaggttcctagacatgtgcccctaaaaatactttgagctagttcaaggggatgttcgaatacaagcctgaaaatttaaaatttcattctgtagggaagaggaaaacattttgcgattttgagaaagggaagtgacgtgatcaaaaatttatctaggagaggatcacagtggcatcagcatagaagatgggctcaaggagaggcaaggatacttgtcagaagatggtaacagcatctccctagtcaggtcagcagccccagatacaattacatcatatttatctttgggatgcagttgaggatattgctcatatatcacatactgataggaatgaaaggagaatgaatcatgttttcctttttactttgactgctaggaagcccagagccccaatctgtgttactcttccagggagcattcaagagctattagccttttatatattcattttgccttgccttagatcacctaccctcactttcctttagcctgaattttatcacttagattttcatcctgctgcaatgtatgcattttagtatgatgccttagagaaggatgtaaataaaatacaaataaaacacactgaagcaattggagagcattttttgtgtgtgcaagattgaaaggtcttagagggctggactgtcttatcatcccctggggcttctgtcgtggtgctggtgccaggtgcgtgcatcacatggatgtaaaccttggactgttggagctggaaatgttccaaatggctctctctccctctgcttctcaaaaatggacatagactaccagtagtacacaagatagtcccagcagggcctgaataaacatggttgggtgtaattgtaaatgctgggtgtaaatgtgtgtgtgtgtgtatatatatatgtacacatacatatgtgtacccatacatatatgtacatgtacatatatatgagtgcgtgcatgcgtgtgtgtgtgtgcacgtgttcattctcagcaaactcagtgtgaatagtaggaccagataaactctaggtctttccttgctgtgttctctcctttttgggtggacaatgctggcatcgtcactctcattttatagaagatgaaagtggagtcatgttttttttattttttattttgagacagagtctcactctgtctcccaggctggagtacagtggcacagtcttgactcactgcagcctttgcttcccgggttcaagcaactctcctgcctcagcctcctgagtagctgggattacaggcgcacgccacaacacctggctaatttttatatttttagtagagacggggtttcaccatgttggccaggctggtctcgaactcttgacctcagatgatccacccgccttggcctcccaaagtgctgggattacaggtgtgagccaccatgcccggcctaattgtcgtatatttatttaatgtgttttaggaaaaaaggtagctaggacatcaaactgtgatgtcatggcttaaattgcttagaatgatgtttgtacagatatttaaatgttagaaagagccaatttaaagaaaatttttaaataaacatggttcgggtgatttgtagaaatggcaagaacatgttggcagtgatacacaaattatgaagtttggaaaacactgattccattcaacctcttgtttgacaaatgactaaactgaggcccagaaaggacagaacacttgtccatgagtctgataagttattttaagccacaggagtaaagagggtcttccccttccaacctcattcaaaagtctgcgtttagggaacacctggtcccgcatcttgcttttgaatcagttttatatttccaaagtgccttctctgttttattctctcattcctttttttaatctgagtcttatcaagcagctatagtagggtaattatttctttgttttgcagataaataaactgaggcccagagagggagtgtgcctgccgtcactcagccactcactcagccagctgaggcaggaccagggctagaaggtttctaggccttcccactgtgcgtgtcaggcagggttgggcggggagccagtttctctgatgaaatcccccaacaaagggtagaaagtctgctggggtaaatgcaaggcagtctgctggccgagctccacttgggagcacagcgagcggtacagggcctattatatgctgctccgcttccgggaagctattactttctgaaggagccacagatgttctcctcgcctgctgattaacgggtgtgttactcagcttggagtggacggatgagatcggcagtgaatattctcaactgtgtgaccaccataaaccctgccagtgcaggtgtagggaccctcaaggccataagcaatgtagccacagcgtctaatgagcaattgagcatcttggaggtgccaggacctgtgctcatggctggaatggaggcacagacaaatcacacactgcctccagccccatgggactcagtctgctaggggaagcagacacataaacagttagctggagaacaacgcagtgcgtgccagcatggagacctggagcaagcacgatgcagggagtgctgagttctttctcagggaccagagaggcttcgcagcgctggagacatttgaactgtactcgtactattgaatagggtttggcaggaggagatgaggaggaggcattcctgaaaggggacctgcccagggttccacactggcctgaactggagaccagcacatgtgcacctgggatgggaatgaactgtggctctgtcttcataactctgcctttccagatgggttggttaccagagccttgtgagaagagattggccttgctttggtttggttgttggtttgtgttagggaagcaatgtgacttaagaggacaagctttgggataatacagacctgggttcaaagctcagttcagctccttgacagtcacgtgacattgggcaagtttcacttctttttttttttttttttgagacagggtctcctaggctggaggacagtggtgcaatcatgggtcactacagctttgacctcccaggttcaagtgatcctcccacctcagcctcccaaggagctgggactataggcacatgccaccatgcctggctaatttttctgattttcttattatttgtagagataggttctcactatgttgcccaggctggtatcaaactcctgggctcaagtgatcctcccacccctaagtgatctcccgatccaaagtgctgggattataaatgtgagccactatttgaccttctgagtcttggttttccatctttaaaatggggataatctcttttgcttaggagtgagaattaaatgagacgaagttggagaaggacttaacccatagccaggtttgtagtgggtgctcggtacattcacgacaattgtggcaatgctgctgggtgagtgactgcatgtgaaaatggagtgtgtgggggcatgggcatgttttgagactgcccagctgggtggactgtgtgactgcagtgtgaggatgtgagggttggttgtacattcccttgagcgtgagctgactggggaagacatgcctgatgctgttgaaggccatggggatttggtatggggtgagctagcctataattcactctgagttggaaaggattctccagtgtcattcagttcgacctgaacctgctatatgagtcccatccttgacatctgtgctaagtgacctccagtttctttaattgccttcagcaatggggaactcaccacctcccaacacagcaaatcctatcgttggacctcaccgactactcattagaaacagaagcagctcagccctatggagcaccttcagagtcacaagattcacccccacaccccattcattcattcatagatatttgctgagcacccttactaccagatactattctgaatcctggggatgcagcagaggaccaaggcagacacaggctctgtcctctcagagtttacagttttgttgaccttaactcacaacacccctgtgaggcaggcagaagagattagaatgattctcattgaacagactgggaaacaggctggtggtggtgatggtgatggctgatatttatagatacttagcacgtgtctggtgctttgtatactttagggaatctaatcttcatgtcagccctaggaggtaaaccccattaatatcacccctcttttaaagatgagaagcatagctgggtgtggtggtgggcacctgtaatctcagctactctggagactgaggcaggagaatcacttgaacctgggaggcagaggttgcagtgagccgagatcacgctactgcactccagcctggacaacaaagtgagactctgtctcaattaaaagaaaataaaatttaaattaaaaaaagatgaggaagcagagaagtgatattgtttgcttagggtcacacagcgaggaaccggcccggctcttttaagcccgggcccatgctgcctcttgaatcaagtcattgagactcgccagagcaatagagcaggggccttgactgaagctgctggatgcagaccctgggtgctttgcaccaccattggaaggtcatgtgggagccctggcagtgtccatgcatgtggaagcctgacgtgagtgacagccagtctggcccacccacagctgtgtttacaccacctcctcacccccaccccaccccatcccatcccaaagagccagaagtgagtgaggtcagcctctcccgccctgcatgtaaacagaggctggaggaccaggagtcatctcagggcagtgcggttgactcctggtgggagaagccaagggcagcttcaggttcctttgctccagaaatcctgttgggcgtctccatcccagcatccaggagcctgttgctcccaggagcagcagcagcgggtgggagggcaggcagggctgggtgaggattaccgcatgctggatcacggctgctgggtaatccccgtttgtgccacttgcaaagcatgaggttggaggcgggtgtgtttgagcagccccagcccctccattgtcgacaccacggattacagcagcttctctctgcagctgagcgtgggtcgcacagactccttgactgctgtgttgggaagatgccctttctaattcctcctgctctctgcccagccctcctcagctcaacctccaacaagaaggaggattttcagccctagagactgggtgatggaaagagacttgagacagacttaaaggactggggtggcgggtcctgctgtcttgagcaggtgacctaacctgtaattctgtctcctcatcccataaatgaggataaaaaataaagccagctgcccagcttaagtcaggtaatccatgtcagggtgctctgtaaactagaggcaccactctaccaatgtcggctattagaatcagccatggcacaagacttgcagtggtgtgagactgcagtcccagctgctcgggaggctgaggcaggaggatcccttgtgcccagggagtttgaggctgcagtaagctatgatcaccactgtactccagcctgggcagcagtgagaccatgtctctaaaaccaatgacaacaacaaaaatgatattagaatcaacagtgagcacgactaccaacacaaataacaatcgtgatcagcaccacatgagtctgtgaaaggtactgttcacagtgtttcctccagcctggaactgatattaggaactaccgtcccttgggcctaaaactaatatatgatgtattagttgtgcattcaaatcaccttgggggctttttaaacatcagacccaagagttcctggggtccatgcccagagattataattcactagatctggggtggggctgggcatctctgtttttttttttcttttcttttctttttattttctttgagatagagtctcgctctgtcacccaggctggagtgcaatggcatgatctcggctcactgcaacctccatctcctgattctcttgcctcagcctcctgagtagctgggattacgggtgcctaccaccacgcccagcaaatttttgtattttcagtaaagatagggttttgccatgttggccaggctggtctcgaactcctgacctcatgatacacccaccttggcctcccaaagtgctgagattacaggcatgagccactgcacccagccatgtctctgtttttaactccagtgctagtggtcgaagaccactcctgcccagagtcaaggacactgcaggacaagtgactgtatgcccagggtcccttcctctgcaccacactcggctgttcctgagcctccttgcaatgggcggtccgagcatgccgctgtatgctggaaggaccccgtcttctcaggtgccacgcagggtttaggaatctctaaacttgaagcttttccacagtttattttatgcaactttctctatctagaatggagacaaacgtgtcttcagctaatttttttttttaactcgggttcttcgaggtataatttacatgcattaaaaaaacatcttttttagtgtccacttctatgcatttcacaaatgcaaacaatcgtgtaaccaccatcactatcatgatacagaacatctccactgcctcctgaaattccctcctgtccctttgtggtcaggccctcctcccacccccaggccttgccagcattcatccgtgttccatctgtagaagttgtttttttccagaatattatatcaatggaatcattgggtatgcagcctttgagcctgcttgtgcactccgttacaggtttttttcttgtttgttgtttcttgttttgggtttttttgagacagggtcttgctttgtctcccaggctagagtgcagtggtatgaacacggctcactgcagcttccaactcctgggctcaagcaatcctcccacctcagcaccccaagtagctaggactacaggtgcacaccaccacacccagctaacttttgtattttttgtagagacggggtttcaccatgttgcccaggctggtctcaaactcctgagctcaagcaatctgccccccttggcctcccaaaatgctgggattacaggcatgagccaccacacccagcccagctttactgtatttgagagtcatccgtggtgttgtgggtatcagtagtttgctccttttattgctgagtttgtgttccatcctgtggatgtgccacagcttttcttcctggggtaatttaattgtttctagctttcatccagaaatgctgtctagcaagaaatgcaatttgtttgattcatatgtaaatctttctgcacgggctgcttcaaaagtcaaaaagactcactcttcagcaattttttaaaaatgttcctactgcgtgctgctgtgagggcacacagttccagtgcttacagggctcagatgagaaccataacgcaggagggggcttgagtgtaattggagcatccccctcccctcctgaaggggctacagtgggaatgtgggtgcatagtagtttctgatttttgatttttgaaaaatcaaagaagtctaggtttttcttaaagatcctgacttttaaaaaatgttggcaactaatttagaacatgcttaatcactgtgctggctgctagctgctggctagattgagtcctgtctcacgacctgtggcttatgtggtcctgagtgctagagattcagacaggtgttctcccctgggccctttgaggacaagtgatgtggacagaagggagaagccaggggcttggctgacacagatgcgggactcccagcctttgagtgaggggaggaggaagcaagagactcagagtcttcccgggaatcactgcttctagagcagtggcttttcattctcactgtggggagctcaagaatacagaggctcaggccccatcatcaagtccatttcgttggctggggagagacccaggtgtcagtacttatgaaaaaacgtctccacaggtgaagttaagcagcaagggctgagaaccgctgctccagagaggccaggaggtctggtcagaggctggggccccagcccccaggcacctctctgtgtcagtttccctggagaagtcatgagtttgaagagtaggcagaggccaggtgtcatcactgagtcactcatcaatggccaatgagagtgcaaagggtagctctgagcacaggatgtgtagcaagactcctgggttcagctcccagtcccaccactgccaagtggggatccttagcaaggtacttaccttttttctgcctctgtttctacgcctgcaaaatgggcacaataatgtcagattcatgaggataatgaggactaaattagttaattcctataagctgcttctaaacgtattacttataaaatttcatttttacttgtttatttgttttactttatgtctgtgtattcattattgtatgattttgtgctggtctcgtatgagggattcagaaatgactaagacatcatcccaaccatcaaggagtttggagttagacccgaacacaggaaaagcaatgcaccagggcagggcaacttgccctcagtgcctgagagtggtttatggaccttcaagtgcaggtgggtccccaggaagaaagagtgtgttggtggggggtggtcagggaaggtgtgtgttgggagagagatgagtaaaattccaggatgcagagagaagagggcgggcatctctttggactctcttggggttggggaggtggaggtaaccacgtgcctgggacaataaggagagcccggctatagcataaggagctcgtgggagaggagactctgcatcatggttgggtgagaggcactgtgacaaatgtggtcttcatctgcaggatgggacggggagatgtaagcaggaaatggcttctgccctgaccctctatgattgtattaggtgactcagttatttgctgagctgaatcttgcaggggtagcctcatctccctctgtctgcttacccctgccatagaccctcaggcttatgggtacagcccccttcctgccccgcacaccctggtgtatcctcatctccacgcctccctgtatcatagctaacataacttaactgagcttctggtgtagaagttcgatgaggctctgtgctgagggagtttactcactcttacttctgtacccgaaatcttccctccctgcccccaaactggaaacacagccttccataaagagacctcctccaaccccaccaccacccaaaccagcaacatcagtgctggagagaagaagaaaaggggaagggccagcataatttgggtggggctttgcatatattagtaataacaatgataaatattcaacaataatggtacattaccataatgaccagatctccagtgccttctacgtgccaagcactttgcaggcatgacctcatttaattctcacagtggtcacagagaaaccccatagcccagttaagcacacaccctatggagtggaaggcctgggtttgaatcctttctctgtcccttcttgcctgggtgaccttgagcaagttactgaatgcctgtgccttagtttcatcccctgtgatatggggaagataatagcgcctgcctcactgggttgcgatgaagactaaggaaggcagtatttgcgaagtgctttgaatagtacctgacacgtagcaagtacaacactaagtgtgaaatacattaaaatatgtaacatatctctttatccattttgtaacaagggaatagaaacaggtgagtcaagggactttacaatagctacatgtattaagcccatggtatgagcaaagtaatgttacagttactgtacatgtattttcttttaatccccacatcagctccatgaggaggcaccattattatcaccacagttgatggacaaatggggccccaaaaggtagatccacttgctcatgacagagcaatagagaaaggccttttcccagggcttatcctgcctcctccggagtctacatggactcacccagcctctccattcattccctgaggctaagcattgctgggtacaagaggctttctgctgagagggatgccctcagtttcccatgtgatgtggaagataaggcaagctggggaaagggcaggatgagaatgtgggagggagggaccactgggtctcctgggacacatgtgccatttgcctccagatggggcagggagaaatgaattgtaattggacagcagagatgctgtaactttatttggagttagcagaggagagccaggaaggtgagaccagcaaggtctgctgggggagccatgggatcatgctggggagtgccgaatgtatcttgcagttttgcaaagttgttgccccctcagtggggctgctccacattggaaattctgcagtagttctgaatgagtcaatgtctgagaaaagcatttagatcagaagttcaggagaataattggaaaggctccattgcaggtctgctgtgtgtggttgtcagagttgtgccctgcacaaaggcacctggcagggtgtaagtgggggctgaaatccagtccacattccactcactgagcctggagctgattctgttggaggaagaggcgcctttctctattctcacaaacgtgccctgtggactggagtggtcctgacgcagtggaagaggtgaggagagagactttatccccagaggcagatttacagaggccagactatgccagtggtttggtactcaggcaaccaaagctttgactttcacagaaaccaggagggcccaaacaaagagcccaggtgctggggatgaaacgatgtgcagggaaaggctatgcactgagcagctcccaggccttctgaatgtccttatgaaatggtcaggggaccagcaggagggtcagtgacacgagcagcctcagtaggggtcagatcaggaggacttggacgaggctgaggcagaagctaattgagaaccctgacctcatgactgggacccaactcgctgtggagtcaggagcttgggctcttaaccagcatgtgtgtgtgtgtgtgtgtctgtgtgtgtgtgttgtgtgcatacacacgcactatgtctaagtggacaccttgaaggaaaagcaccccagtagaaagagtcctttaaaaaccaggaatccaaaaggataggtaatgcccctgccagaggcaccctgccctggaggagttgcctgatgccatgttctgtcacccagcattgccattatgttggaagggaaaagggagggtgctggtgtttgctcagtgcccaccaggcaccgtgccagatgttctgcatccattacctcgttttcctctccacccctcttcctcgtggcttctgtagcaatgacagcattcagttgaataaagaaagaaaaagagggaaaaaatctcctttcaaggctcagcagtgttgctggacccaggggatgctgtgtggggtggtcgtgtgcaacgggcagcatgaacttgactatcgctccctcgacccaagtggtcattgttatcatcccctgagctgtgcaacttttccggcaactgcatggcaggcacgggcagccgcatcagcacaccccaaggaacggtgctgagggatgagagaaaacctcgaaatgaaatgttttttttttgttcctggcaggggcaggcctgctaggcttgggtggggctctgtggtctctgggcctccttaaaatagcaaagttctttgctgtgggggcagaaagacctcatggggacaggtcacaggcagtgttcaaagactcagagatctactaccctgttccttttcttctttatttccatcagttggaatgctttaggctgcgagtaacaaagaaagccaaccaagactgactcaagctctaggattttcatggtttttcaaacaagagttgcggaggaaggaggtcctaggtttggtcggtggctccacagtgccatcaaggacccaggcctcttctgtccttgtggtctgtcttctcatcattttggccttttggttgtaggcttgttacctcttggccacaaaatgggtgccagagcgccaggatttacatcctcaaatggaagcaaaggcgggaagccgtgtgtgtgccagtatgccaagaaagaacttttcttatgtctctctcctcttactgagacaaaaatccttctcagaagccccctagtggacttcctcctaggtctcacttgccagaactgggtcttggaccctctcccaagggtgaggggtgttcccgtggtggtgcagggcggttgggggtagggggtgctgggaatggcaggtacgagtccagtcagcagatctgcctgcctcccttctccaggagcttgtcccagtgctcccagggaacacctggatggccgggttctgcagtggtgcttgactccccatgtcccccaaaggccagccacttgcccgtcagtgggttatggatggtctccatgtatagggcattgtgaggaagaccaagagggtggagactgtcctgagaaggaggcagtgttgcccccatttttatagatgagaactcgagctccaaaaagtttatgaacttgtctagggcttgttatacattttgtaacattttacagatgagaacacaagctccaaaaagttaatgaacttgtccagtagatacctagtaagtggtggcgctaggatttaaacctgtgtctgtctgtgaagccatcctctgtttggcccactttggaacagtgtcctctcttcttccagaatctcagccaggaagtcggcaacctttagacttcctgtgcattccagctctcagagctgacaccagggcccagcttacagcctccgggagaagttaatctcaacacgtgtaaagagaaccaaccaaccctgaagtacacaccaggtgccagggggcagggtggcagccaggaaatgctgcaggtgttcaggggagggtaggtccctggggatgggatggtcagagaccccgtggggccaattcgtttacctcttgacatcagtagctacaccagagaaggtgctgacacctgcacaaagacagcccctcctgagctgccaggaggaggtgctcctcgcagtcagtgtaaataggctgctggaatggccccagatggccaccagggagggccacatgccatccctcagcatcgctggagtgggctctctcttggttgctagcaacagattctgttgacctttagtaatgagggaggcagggctagagggtgactagcagccaggcctcccaggctcccaggcctctcagatgcctggaatttcggagctagaaggtagtcagattcccgttatcttgactgctgcagcggggtctctgggatggtgatgtgagtgcctcctgcacccgtggcccccatgtggcataactccttgggcgctattcatccacacggcccatctgtgcagggtacagccttcatggtcttagctggcagccctgacaacttggatgtgcaaagaagatacaagtttgtttcctctgaagcttgtctggtgtcatccaggagccccacctggtaggtagcagtgataaaacgcattcagctcggtccagtagagttgtgatggagtcagccagacaggactcttcatttgctaacacggagagacagaagttgagaaacgtcctctctcaacaattctggctcttaagatattttgtggctgcagaatcctatcttggatgttggaatgtgaatttttttgagtcctgctttaacagtccgaactctccctggataatggatgtcatttgtttattttttaatttttgtgtttttttggagacagagtcttgctctgtcatccaggctggagtgcagtggtgctatcttggctcactgcatcctccacctccctggtttaagtgattctcgtacctcagcctcctgagtagctgggactataggtgcgcgctagcacgcttggctaattttttgtatttttagtagagatggggttttgccacgttggtcaggctggtctcaaactcctgacctcaagtgatctgcccgccttggtccccctaagtgctgggattacaggcgtgagccaccacacccggccaataaatggatgtgagttaggggagagcaggaaggttacacctagtaaatgcagaacagtgcactaacattatttttaaaattacagtgatcccctttacattcctctctgacctcttctccatctctcttccctccgcttatggcttctgcctctgccaccaactagtggtgcaatgtagcccacatttaaacccttcaaggggaggagctggttggtttagctgtcaccattgagtgtgggtcacttctatggagcagagctgtgtgctggacagtcatgcagaatgctacatgaccacctagaatgaggcggcctcccttgtgaactgggggaacagagggcattgtaggggaactgttggccacagatcccagcaagactcctctttccttgctgggtcctaaattaactactggattctttttacaaggcagggagtgagaggtggagaacatcatgagacagttatcacggatgttttcaaacaaaaacccattgatttcctcagtaccattaagtttaatttaaaaaaaaagtttctgctctagtttctagaccctcagctggtgaggccccttgaattgtttccaaagtccaagaggaaatggttactccaacatacacacacacacacacacacacacacacacactcactccttggggacagcacagggtggacagtgcaaagaatttatctccaagtaagctctgtgcatgaggcctggtatctatttctttatgggcaagttgatttactatccttttttatacccaaaatgattagcagcaatataaagaacttcaacttctcctttctcacatttggggcactgagagatgggcttccttttactctaacagagatactacaacggagccggcagatcgtccttctcttccatgccatcccctggctgtaatgtagatagattatctcttgggaaggggaaggcccatcaccagttaccacattcccctggggacagtttatcagtccatctttttctgcattgccaggtgacagggagcaacgtcttggtctgtgggccaggggccaggccaggcactctgaacacgggatcccggttatcctgagagtcggtcagggcatgtcacaggcagggagcctcggcagtggcagctatgcctggcatctccccggctcagcctttggcctggactatgaaacagccttttaaaaaagttgctcagcctcacctaccaagaagccggaggccatgaaggagggggtgaggagtaggacctgctgtggacagagaatagggctgaaaaccagaagtcctgggtttaactccaccagcccttattgagcacttggtgtttgcatgatcttgtgcatgacagtctagaaatgcagaagaaagccctcgagggatgcattaggcccagctcttttactcactcgctggccggcagggtggttgtcaggggcaaacccaaagcacttttgaaggtgcagattgactgataaaataatctttgttgagcagtcacagttagcaaagcatgttcacacacagtattatttcactggatcctcataactatcctaggaaaaatatgaattatatccatttttctgatggaggaactgggaggtaaagggacagatgcaaagtcacagagctgaagtttcagagggcccagtgctccttgcaatgccactcagggaccaaagtctggttccgggaccaatagcttcagcatcacctggcaacgtgttagggatgcagattctcgggccccaccctcgacttcctgaatcagaaactgtgggcctcagcaatctatgttttcacaagcccaccgggtaattgtgatgcacctgcaagtttgagaagcactgagctggagagtgatacccaactgaatcatctatgtgaaccacctggaccaccaccgtgttcaaccatagattctcatttgagtcaagggtggggcctgggattctccatttctaaccagctcccaggtaatgccagtgctattggtccacaggcagtccattgaacagcaaagatcccaaacaggaagcacctggtgggcttggttaaaatgcacatttcctagctcattcccacagtgtgtgattctgcaggctggaagtggggcccgggagcctgcatttccacaaacacttcaggtgattctgaggcagatgacctggggctcgcactccaaggatctgttccccagagctcgagcttgcagaccatccaccctggcctcattttcaaaggttttccaccttcactcctctccccactggtcttgaaccacccatttgatcccctgccagactttgggctaagggggtgcaagttggaggccatctctgagccagcagggccctcagttcctcaaaataggtcaggagtctggcacagaccagcctcagtggctgcaaatagaaaccatctgttgggcctgtgttttgagctccaccgcccctctctgcctggccagagaaacacagaactcagaagcccagtggagcatggatgcttccctgagtgggtgctattctgccaccgcctgcccagacagactcccatgggatctgcctgcaggggaggggtggcagcaccagattctaccacccccagggcaggaagcttgcagtgtggaccggtcatccagagacaagtcactcctcctctctgggtctatgaaatgagaggctggatttagtggacctgtgagtccctttctgctctgacaggatacggttccttgaaagcctttttgtgtcaggaccacatggaggaaaagttgggcccagaggaggcagacatttcattttcctggctctctgtgcagagtgaatattgtgggatctggtcctgcaaatagggggatggacaaggtttgtgatctggagctccaacgggactcttgtaggccttgaggcaaagagttgggttgctcttccttgtctctgccctcctattccttccctcactcgtatatttatcaagatgatgttaagcccagtggtaagcctggaaaaataaggaggaatgaggtgcagtccctgccctcaacagcagccaggataattgaggagcagacaagtaaaggagagacctcggtgacagctctgaatcagatcccagctcctccacttcagtgacctggacaaacccagacgcatctggaaatgggaataataattgtacctatttctcagggttattttaaggatgcaggatataatgaatgtagaatgcttagctcatcgtaagcactaaacacacgttggctgctgttagtgtgatgagccaggagcaaggggagcacagcatggaatctgggggcctcagaagacttcccagtgaccatcctaggggaggtaggaagctgtcttgaagagaatgaggcagaggtggctacagccttctccttacatgtccggccttgttcaccagagcaggaaaggctgcagggattcagggcagaggcctggtatagaatagaccgtgtctctggctgggcttgcattgggtggtggatgcatgctgcgtatcctcccctctagagactgttgagaaggcgccatcccagccctgcctgttcccacttggcttagatccactccctgatagcatgagggaggcaggacagagctgggtggcgaggaggaattccaatttcctgggtgagaaaaatgaggggcttgcccaaggggccctgtgagttggtaggagaactgtcctggaacccaagaattccatgtttgtcagagatgcagagaaagacagtggagtgactccagatcatggccttcctaagtccctgtacaccccacccaggaacttccaggtgtggaggtttggattgattcttttcttccaggatttaggacttttagtagctaactgatgacttttaggagctaattgatgtcttttctcccagtgctgtccaatgcaacacactgcagtgatggaaatgctctgtaatctctgctgtgccatatggtagccactagccacatgtgcctattgagcacttgatatgtggttagtctaactgaggaggagttttcaatttaattttaattaatctgaatttaagcagctgcatgtggctagtagctaccatacaggacagtgcagttttagcctactctaaggtgcacaggcaagagcagatactcccaaatgttggttccacagatacatgccttcacgacacactcctcacatgattctgatgcataaccaagtttggaaatggtcagggcaggggtctgagagacgctatgctgagagaaatggcacagtccatgcacctcccattgtctgtttggctttctcattttacaaaggaggacactgaagcctggagtccactgggaattactgcccaggctggcgagcccctcgggactgtaggctggttccctctgctcctccagtatggaaacatgtgctgtgttcctcctgtgtgtccacctttcccgggtggagggggaacagatgatcagctctcgctcacgacccagaatgctttggatgagatggagcagttgataacggtgtctttccttcatgacagtgccatactattttctcttgtgttctcatgttccatcctcatacagattccaggacccaggtcagttgatacccacatatcacagaagaggacactgagcctggagaaggaaggcggcttgtcccaggtcacatagctagagaccaaactagatggaaagtgccagtctttctctgacagcacatgacccaggagaggctctgccacatatcctgatgggctgccccatgggagctaccagggcagatctgagagttctcctgggctccccccacattacacagctgtttcccagggggcttcctcccagccctttgatgtgaatgtagccacattgccccctcacctgagtcagaaactaaaaaaactgctctcttacattttcgtgttccacttaaaagctaaattttgctcatgtcatcatctagaaaatgcacccgctggccacaataaatcatttttgagatccgaggacaggatacaatttgcttccatgtggagtgtacatagtgattatctcagaggggagaaaaagccatcctacatttcttgagaggctataagggccattcagctgcaaaatgaatactttttccttccgggccctccccatctgggagggagaccaggatggccctgggcccagggagaggctgccagggagcaggcccagcagctgtgcacatctggaatccagaacctctccctccctcctcctgaccctcagcccagcccagcccgccctgtcctcctcctcctggcaaagcctgacctcctcaagtaaacatttgattatttgaagtcagagactccctcacaggagaaggagagagggtagagctagtgttgagcaagcacccatcctgggccagacactttgccaagcaatttgtgtttggtcacttcattgtatccagtgagctggatgacattattctcattttacagttaaggaaactgatattcagacaggttgagtaggtagtccaaagtcgtacaactaacaagtagcagagccaagatagaaaccactggattctttctgactcctaaaactcttcctgctacagtttctttacacttttgtgtagggccctgtatttatggagctactggggaggggtaagagttgaggtggagaggctgaaggaggagaagatatgtgttgtattggaaagagcagtagactaagagtcagaagttcttggctgaagtcttggctacaccattttgatagcttgtgactttggacaagtctcttttaactcctccatgagccacacagacactctatgttgtaaatgggattgtagcacctgcctagttctgcccgctggacagcagcggggctgacagaggtggtgtctggagaggatcatgactgcgggtgggcttttcagggtggttctgcaggcactggccccttgctgattctgtgctgtcaacagcaagggactcactaggcctcagcctgacagcagtactgggttcagaggtgttggtattctggtgatgaggagtctaatggagacagggctgcgtgaccagaagaaagaacatggtagaggaagggctcatgagggagggtaaggaccagaccctcatcctgtgggcagggcagcacatcagcctgaaaataaaatgcaaaacctcagcaggctgaagtcacagccttggggtgaggttcctgaaggaggcacctccttgtgcttgaccttggctcttgcccccctaccatactgagagatgattcagccagagtcactatgaggctcagctataagggagccctgaacccggcatggagtggggtggggctgtgcaggggccagaaggagttggatgatctggtaacttacaaaccactaactggagaaagaaaacatgcatatctaaagcttgaaataagtgccaaaagcattaatcagctctgtgggacaccctaaaaggaggtggctattgccatgtaagagctgttgtcattcagggtcacagcaacccaactggggtaggggaatataaaagaggaaggcccccagccagggtggcagaaccaaggtggtagaccccaaaactcctctctgttccaacatgatgtctttaataaagtagaggaactctattatctcagggctggaaggcaatctaattccattcactgttccacatcgtccttaatcggaggtcatccacctaaatcttgaacccccccagggatgggaagctgactacctatcaaggtagcttctttttccaagttaggcagctctaaccattaagaaagtcctttcttttacagagttcaaaaccaatcttgaaaaccaatctcaaaaccaatatgtcccagtcttgcgccttgtgctcattggtcctaaaagattcaaagagagtgtgttctgctctcactagaatcagtcagggggaatctaccaggatctgggcagggctttaagggtaaaggcaaagggccagattttcaggtcacctcttggccgcccccaccgatttccctttgaggtctgggcacctcccccggttacagcctcggcaaggcctcctctctctggcagagtagggaggagtcttttctgttccctgcctgcgcacccatgcatctgacctcacagtgaggtcagctccttagtaatgcaggtccttctgcagacacccagctttggcccacagtgtgtactcgtgcctggcctggccttccagcctctgtccatcaccttccagaacaaacccttggcactggccaggtggcctcctcactgccaacagccagaccaggtgtgtgctcacacattccccctgccctctcctctcctttcgcatgctttaccaaagccaagtaactgataatggagacatagtaacctgaatcaaatcaaggccttagacctaactcttaaagtttacaagggatacaggaacaactttggcattgccctgaagcatcatgagacaaatcattggaatgttttataagatgactgacaactgacctggtatcttccaaaaggcaatgctatttaaaaaaaaaaaaaaggtgataggagtattgtaggttaaagaaggcaaaagagagatcacaaccaaatgcaacacatgaacctaggtttcactgaatcctaggtcagaaactaaaatagctgtaaaaggcattggggggaaatttaaacacgggctgggcattacatggtactgaggaatggtcagttttctcagatgcgatgatggtgatgtgctaaggaaattgccgtcctttgtaggaaatgcatgctgaagtaatgaggaggcaggagtcatgatttttgcaagttcttttcctgtaattccacagaagtagaaagaaagagaagggctggggtagaggaggaggagcaactggtgcttggagcagcaaagtgtctttcccaaggtcagtaggagtctgaatggggagcggagccaggactgcagactcccagctcagggttctgtgtgaagacttagcataggttcacgtggagtggagctccacgcccagggttgtggagccatcgatcaacagcagcccctgacctcccttcccctggccctttcaaaggcccagcagagagaatctccatggagatccagtcccagcctaccagccactgtggagaggccagcccaggcttgctgagagacagacactctccattctttccaggaagcaggcctgcctcattctagggcctgcccaggcccatccccggggaacacgctgagtgggagaacatgcctgctcaccccgagcctgagcgctgtggtcccccaggatgcagcatccagctcagaagtgctagctgggctgtgggggcaacaggagatggataaggagtcactcaagagaccacaagtgtgcccaccagagccttcaccacagatgcctccttcctgtgtctacaccctgaggactggggagctggggatttgggggagagaggaaagaagggcagagagtgggaggaagcagaaggagcagggaaaaggagaagggggagggtggacgaggaagaggtgaagtcagatgggaaaacaggcacagaaactgcgggccgctgagcgctccacctggggaacctggggtaagtgtggactttgccgggtgggctcaggagagcctatcaggtcagcatgtcctgtgctgggcatatgacaggcagcttggcactggctcctcccaagcccttggaggtgatggggatgattagccacctttattttttatttatttttttgagacagagttcggcactgtcgcccaggtggtagtgcagtggtgcgactcagcccactgcaacctccaccttccaggctcaagccatcctcccacctcagcctcccaagtagctgagactataggtgtgtaccactatgcctggctaactttgtgtgtttttggtatagagacagggttctgccatgttgctcaggctagtgtctccaatgcctgggttcaagcgatctgtccgcctcagcctcccgaggtgctgggattacaagagtgactcacctaacccggcctagcctctttttttttttttttttttgagacagagtctcattctgttgcccaagctggagtgcagtggcgcgatctcggctcactgcaacctctgccgtctgggttcaagcaattctcctgcttcagcctcccgaccagctgggattacaggtgcctgccaccatgcctgctatcctctttaatatgggagtagatggaagtggcacagagaggttaagtgatttgcccaagtcacacagcagggttgggatttgaatctaggtgtgcgtggcttccagtccggttcttgtgacccttccccttgtaccccagggagagcctgcggtgacgtctgcactgggaagagcagagaactgggcactcagtctagaaacaggccttgtgcagaccatccccggtgcccagccacgggctgtgctggggttggagacagaacttgccatccctttggctccctgagcctcaggttctggtgtcatctgtctccccactaggctgggctcccttcatggataggctgggcctgccacgaggccagttacccagcaggtctccccatggcctccacgactcacctaggctgcctgggaaaagtgcaaactagtcttcagtctttcagaagaccctggtatcacttcctgccatcacagagcagtgccccacccccaggatggaagaggctaggacaagctctagactaggagcccagggagaggcgccggctgtctgcggattctgagaaggtcactgtggactatgtagatcagagtgagtcaggccttaaaggctgagggttggctgcacagagaagacattccaggctagaattgcacagcaaggaacaggaggttggagtgaccaagctcaacacctcctttctcgtctgtggaaactgtggcatcgagaatgttctgcatggaaaagacagagaaatacctggtgttctcacttcagattaaacttttgccaggtccaccaaccacccatactgtatttttcatactgtatttttctttgaattgattcactttttaaaacttagccacattagcagtagtatctgtgaaatcatggatttggcatgcaagttatattttttctaaagcaatttaaaataaacacatgactggctaaaattaacttcatctctgtaaccatgtaaaggaccacctgggaccccactttgggaatagttggtgtcctgatgaggagccagtgcttggggaagggagagccttgcctgcagtcacatagtcagcttggggaggggaggggagaggctggtctgaggtcacacagcctggggaggagaggggaaggccttgcctgaggtcacacagtcagcctggggaggggaaagggcagtgacccaccagcctcccatccagtgctcctgcctctccagcatgactttatccagacagtctggagcagaactcagcagagagagacagcaagtgggacagggacacagcatgggcaaaggcagggaagtagggaggagcggagagcagggagactggccctgtgggatggagggcaaccttgggaagtggagaagaggcagtggagaggcaggggttggggcccagagagctggtggaagagaatttgcttgaaggtgaggaatcttccctgggattctccttctggattctgaacttcttccttcaataaagaggagtttgtgaattagctcatggcttgatttaaatcaaatgcaggccaggcggcaccgtggctcacacctgtaatcccagcgctttgggaggccgagtcagatggatcacctgaggtcaggagttcaagaccagcctggccaacatggtgaaatctgtctctactaaaaatgcaaaaattagctgggcgtggtggtgggcccctgtaatcccagctactcaggaggctgaggtgggagaatcacttgaacctgggagacggaggttccagtgagccgagatcgcaccattgcactccagcctgggtgacagccccatctcaaaaacaaacaaacaaaaagaaaaaccaacaacaaaaaaaaccaactacaaagtatatcagttacaacaggctaggatatgctgtaataacaaattaactccaaaatcttagcggcttataacaaaagtttgtcactcatgcaaagtccgctatggattctgtaagtgttccaagacagcaacgcctcatgtagtgactcagcaatccagattgctttaatcatgtgctttgtcatcacatgagactctccagttgtgatggaaaagtactgattcctgggttccatcctcaaaatattggattcagtaggtctagattgggacccagtaatcagcatttcttataaatgacataggaagatcagagacttccccaaccccagatgactttgatacaggtgatctgtgggccacatgctgagaaaccttgctccaaagggtaatctggcataggaggagtcttggatttccagtcaggagacctatgttcatggccctacttagctgtgtagccttggacaagtcacttaacctctctgtgcctgatgatatgatgataatatccaggactcagagatttctgagggtgtacctgtggattagaaacactagagaatccgaggggatgacagtggatggggggttgccttcttgcacgtggagagacatctccccaccccactcctgctgtgggccctgtcctcaatcttggtaaacactggcctctgctgtccgcatctcccatgctgaaccgagcacagttccagatactcaggagggagtctgtatgtgttcttgcttcgctctatcacatgataggttcctgggtagtaaaaggaccctacaacctttctagaaagtggggtgggcatgtgtaccaaaagctcctatgccaatctttgtttttgtaagactttattaaaagatgaaacccactagaacgggctgggcatatgagtgtgccctgaattcttggatgcttcttcctttccatctcttcctgacaggggacccagggcctgctcacctgctgcacctctgagccgcagcttccctcccccaagagcccagccgaggcccttcatggcacagggcccagcctgacccttgtctctcctggcccctcacagatgtcctggcgtccgcaataccgtagctccaagttccggaatgtctacgggaaggtggccaaccgggagcactgcttcgatgggatccccatcaccaagaatgtgcacgacaaccacttctgtgccgtcaacacccgcttcctggccatcgtcaccgagagcgcagggggcggctccttcctcgtcatccccctggagcaggtaggtggcccctaccttcactccagctgcagctccagggcagagaggagccctccttggtctctcttaggcctgttgaccctacttctctctgagttcccaccttttacttcctcatcaagcatctagtggctatgccttctttagggttttcctgagattcaacagaacaagtgcaggacctggatccaggagacctgagatctctttccagagcttgcctaaaggtatgcacttggacaagccactcccttggtgtacacaaggttccattccctgagggagtggaacactctgatctccaagaccaagtctagctctaccactctgtgtcctgagtgtcctcttggtttggagccggaagggatgaagacctagccataggtattatacattgagcatctgcaaaaattatacaattttttttttttgagatggagtcttgctctgtcgtccaggctgaagttcaatggcgcgatctcggctcactgcaacctctgcctcccaggttcaagcgattctcctgcctcagcctcccgagaagctgggattgcaggcacgtgccaccacgcccagctaatttttgtattttcagtagagatggggtttcaccatgttggtcaggctggtctcgaaatcctgacctcaggtgatctgcccaccttggcctcccaaagtgctgggattacaggcatgagccactgcacctggcccactcattttttttttaattgctctctactgagagactggaaataatttaccttcttccccatcccccacctcctatctaaagattttcccctttctgcagctgcttacgtgaatataacagattaaatctgaaaaacctagatcatgaaatttttaagccatagccactcaggcggagtccccagaggcccgtgggaggtcacgcgcttcagggaaagtgcttgctgtcagtcccacttgtttatggctgagttcccccttcccagcctgactcatccccactcccaccctccgccaaatcgctcagggggaggaagaggtgcatgtggaaggaagccttggttctcaaaattcactgtcagctggtggtggaggatggatttttccagtctctcctacccacagtgggggagcacagatttggaaaaggcttagaccagatcttcctctccatcagaggggcagctgcagggacactgaggacagagcctgatgcacagagaggtccaaggagcatgcacttgatggcgggaggtctgggttctgcccttgccagacttgggaccgtgtgcatgtcacttcacctctctgacccttattttcctgtaatggtaaaagcaggatcagaaatcctcctctgcctacatctgtcatgttggccttaagtgagataatagatgtgaagctcctagtgaaccacacaacatgttaaggatgtttggttacttttttggggaagttatccactatgctggtcaacttggcaaaggctcacagcagctctaacacattcggaaggatcctcaaatgcagcttcccttccctcctgaatcagatggcctccgatcactgttgcctcagggacgcactcagctccatccatccaggcctgcaggtccccaggaacatgtgggctggttcttactgaggctcaaacctatcgccggcaccctgccatgctccactttaggctcacaagggtcaacaagcaatacctcacatcatgacaaaaattaattccagatgcattaaagatctaaacatttaaaataagaaaagctacatgtgtattagaggaaaatggagtgcatgtttaaaatcatgcaatgaagaaaggcttcctaagaaagccaggaatcccccaaatcataaaggaaatgaataggttagaataaatttttaaaagacagtttctgtattacaatgaggcacctaaacaaaatgaaaactcaagccacatacttgactacaatatttgcaatatataatagacaaagtattcctgtgaagaatatataaagagttccagaaaaattaacaagaaaaagaacccgaccggacacggtggctcacgtctgtaatcctagcactttgggaggccaaggcaggcagatcacctgaggtcgagagtttgaggctagcctgaccaacatggagaaactccgtctctactaaaaatacaaaattagccaggcgtggtggcacatgcctgtaattccggctgctctggaggctgaggcaggggaatcgcttgaacctgggaggcgggggttgtggtgagctgaaattgtgccattgcactccagcctgggcaacaagatcgaaactccatctcaaaaaaaaaaaaagaaagaaagaaagaagggactggggccaggtgccgtggctcacgcctgtaatcccaacactttgggaggccaaggcaggaagatcacttaaccccaggagtttgagaccagtctgggcaacatagtgaggccctgagaccctgtttctacaaattaaaaaaaaaaaaaagaaaaaaattagccgagcatgatggcttgccctgaagtcccagctacttgggaggctgaggtgggagcattgcttgaacccaggaattggaggctgcagtgagctatgatcactcccctgcactccaccctgggcaacggagaaagatcctgtctctcaaaaaaaaaaaaaaaaaaagagtctgggcatggtggctcacgcctataatcccagcactttgggaggccgaggtgggtggatcacctgagtttaggagtttgaaaccagcctgaccaatatggtgaaaccccgcctctactaaaaatacaaaaattagctgggcatgatggcatgtgcctgtagtcccagctacttgggaggctgagacaggagaattgcttgaacccgggaggcagaggttgcagtgggcgagattgcgctactgcactccagcctgggtgacagaacaagattccagctaaaaaaaaaaaaaaaacgaaagaaagaaacaaaaggccgggtgcagtggctcacgcctgtaatcccagcactttgggaggcagaggcgggtggatcacaaggtcaggagatcaagaccatcctggctaacatggtgaaaccctatctctactaaaaatacaaaaacaaaattagccaggtctggtggcgggcgcctgtagtcccagctacttgggaggctgaggtgggagaatggtgtgaacccaggaggtggagcttgcagtgagccaagattgcgccagtgcactccagcctgggccacagagcgagactccgtctcaaaaaaaagaaagagagagaaagagagagagaaaggaagaaaggcaaaagatatgaataagcaattcacagaaggcaaaatatatattttaacctactaattggaaaagatttaaaagagtaataatcatcagtattgccaaaggtgtgagagagcaggtgctcaaatacactcttcgtaagacgtaaatgaggcaagttggcaatttctactaatatttaaagatgcatgtctactgacctagcaattccactctaggaattcatcctacagaaatattctcaagtgtatttaaaaaatacgtgtgcagcattttttagtactcgattatttttacaagcctcaatttttaaattatattcaataaaaataaagtttctctgtcaaattgcttaaacgtttctaaacgcttcctctcaatttctgtaatggtaacaaaatgttttacactgtcagtagcactggtctggaatatgatcacactttgtaaacacttcatggacagcagaaaagaacgtgttctttacagagtatgtctatatatagaaatatgctatatatatacatatcaggtgtatttgatatatatcttttttcaactttatttgttcacgtgctgtaatatattttatttaacttgattaatcatggacttattgtgaccactcacactaccaattgatttctgttgttttctctcatttcaagaagttttcactttacatgagtactgagtgattgtgtagcaattttatgatagtgaaaggttggaaacaacctgcaggtccatcattaaggaaatggggtaaacaaattagggaagagccacacaaagggacactatgcagtcattaaaatgatgctgtagagcagtctcgttctccagcgttcagtctcaggatcactttccactcttgattattgaggatcccaaagaacttttgtttatatgggttatatctgtcaatagttagcatattcaaaataaaaatgaaggaattttaaactatgtatttattaacttgcataatgataagtctatttcatgttctcctgaaaaacatatttttattaaaaataactttttttaagacaaaaaagttaatgagaagaatggcatcattttacacttttgcaaatctctttaatatatgtctggcttattagaagacagctggctggctttgcatatcacacattatgcagcctttggaaaaccccactatacactcaagagagagaatgagagtgaagtggcagacaatgtcttattattgggaaaatacttttgacccaatggactgcattaaatggtctcggggatctccagaggtccccagaccatacactgaggaccagcgatgcaaagtaatatttaacaagagaaaactatttatatgatacactgttacgtgaagaaatgcaatatgcgattaatcacattaaaaatatctaccccctgtaatcccagcactttgggaggccgaggcgggctgatcacccgaggtcaggagttcaagaccagcctgaccaacatggagaaaccccgtctctactaaaaatacaaaattagcggggcatgatggcaggtgcctgtaatcccagctactcaggaagctgaggcaggagaattggaggcggaggttgcggtgagctgagatcgcgccactgctctccagcctgggcaacaagagcgaaactctgtctaaaaaaaaaaaaaaaaaaaaaaaaaaaaaaaaaaaaaaaaaaaaaaaaaatggagacattcctggccaacatggtgaaacccccgtctccactaaaaatacaaaacttggctgggcgtgatggtgcgtgcctgtaatcccagctacttgggaggctgaggccggaaaatcgcttaaacctgggagccggaagttgtagtgagccgaaatcgcgcaactgcactccagcttggcgacagagtgagactccgtctcaaaaacaaaaactatctgtttacctatctggaagcgactgcaaaaatatacatcaaatgtcaaaagttgttacctcccaagtattgggaccatgagtgctctttaattttcttttcccttagctatatgatctaaatttcttacaatcagtacttaacgttttgtactttcgaaaaaatagaggcaattcgctgatgtgaagagggagcccctgaagtttcagaggccctacaggccagagaggggctcagtgcagggtgtgcactgggtaaagacgaggggccccatccgctaggtttgcctgctgccctctggtcagatgaatgtcttcatctgccttgaacatcagccctcccttatgtatgttgcaaatgtttcctcccagagtaacacctgaatatgggctcgcggtagaaagttcaaacagaactgcaggacccatagtgaaggaatggcgaggggtggggtgggttactgactccgtgggagggtgaggcagctccttgatctgcgaggctcaagtaagtagtttgaggcaggaccccgagtctggggactatgggacgcagggtcccgcctccaaagcgggatgacttaggtattggagccagcgccggcttcccctgccgcccaagccatggccgtccctctaccgccccctgtggtcagggctgggcctgcaggcgtgggacagcctctaggttggtgcagggggtgcggggagagggaggcagtcaggcccaatgcggaacccttcgttgatctggcagcggtggagatgttgttccacactagccgattttctaggaaggaaaagggtcagattattttagctccagttttcaccccctcagtttgatagaaatttccctgaaaacagtttcctgtattcaatacaaacacagaaaagatttggaccatttcttggtgactgcaaatcatcacttggagcgttagttataagctattaattcatggtgggacagtcttgtccctacgctgaatggctccagatttttgtcttgagcaaacagcaggccgcagagaattgtctcagttcttctctaagttttttccctccactatccagcatatcctctcattccttgcttgcttttctaagagatttggaccagaagagaacagcacctgcccaggatccccaaatccctgccccgaggccacacctcctgagggaggctcagaaccttccacagagcttttctctccttgctccatttccttcaaagccagcttgcttgagatttccatatttatgattaaaaattcttctgcagagtaggaagccgtgtctacaacaactacaaacaacaaccgcgaagatgctttgcctttgtacagcactctcaagttccagcaaactctatgttcattgatcctctcagcaggtgggtacagccatccccacctcacacttggggaagctgagacggcacagccgggcatacagtatggaccccaagccagctcacttatttctgaatccatgattctttccaccacccatgatgctggtaaacagataagttctggctggcagatctcgaaggagtggctctgtcttccccaggtctcttattcgggctgccgttgtgaaggccagtgcctgttttttcccctagttaacattcagctgccagctctctggagtggaatgttaagctgcagatgggggagcaatcagcaccctgattgcctggcacagctggaggggccttatgaatattccagagagcaggcactgtgcccagcagcctgattaaccactggggcctccccaggggcaccacccctttcctgctgcacttcacccggactgcctgccacctccagatccaggccacaggaagaacagggctagaaacagagctacctgctaccccaactggcacctggcagaaagagaagaaacccggcctagatatcaagagtctgggttctccctataacccagccattctcagtcccagctgtacaccgggtctctggggctgggatggtgcattctccttccccaccacagtagtgtggcctgaggagcttttgaggatctaacatacctgctctgtttgaatctcacctcaagttctatgatgaaagtatactcattctcctcgttttacagataaagaaacagaggctcagaaaagtcaagtaactcctttaagactgcacggcccacaagtagcagagtcagaatttagcccagggctctcccagtcatgtgcctgcccaccttacagaggtttagagggaagcatttctataaatgtgccttgtattactattactgccatttggatgtcttagaggatttccttgaacattaattcaaccaacactttattacacctctctgatgagctgacaccccatgtgtccatctcttttggaagccgagagagtagatgtttccaaactccatacaagtgcagcagatcttggggaagcttactctctgaaggaatgaagcaacaattctagttggcaaggagaggcaggggtggggtcctggagcagcggtccagacaagatagcatcactccagcagtcaggaggcaaaattggcccaccgacccacccattcatctaacagatgggtattgaatgcctgctaggtttcagtcagagttcctggaccgaaaaggaagcagtaaacaagaccaagtcttgaccacctagagtttgtagtccaattggctacctctcttggaccgagagcccccaacggtgggaaacttgtctggtttgcacaggggtggctcacagtagatcctcagccaaggggccattgggctgacctatggccaaatcacagaggcaggtgcccatctactctgagatggggtctcttctttgctgatcctggcagcccatccccaccagatcctagggagaatgcagcaccatacaggggctgcccacactgaaaggggctgcatcctcccctgaaagcccttagaacgatattgcatggcccagctggtcttaactctggagctgaatctagaagttggtggatcatttagctccatagctcacagcatgtctgaggcctaatattaaaagaagggtcaggaggaaaggtgcccagctcagtactgaggactgtaataaaataatattttgtttgcttacccaaagccttcgttcccattccagatttctgtaacaccccatcactcccccacaatcagcactgagctcctcaaaccttctctcccccaggaaaaaaaaaaaaatgcctgaatcttcatcactgctctgcagtgaggtctccgcccctccaagggaattcagagagccttttccaaatccatttttcagatctttcctcaatcgttctttgttcttcaagctgccttccgcttggtgcaatttgcatctcaaagcccatgacagcctgaatgtacagtaagtgactttggaaaagggaggagaattgtgctctcaaagagaaaagtcgcaactttatttcatttgtctgaggctcgagattgacagcttgctttgtgtttttccttttttggaagaatggctgctgatttttgaggaaagtgaaggcgagcccttctgcagaaatggaagtgtcgctctcttattttattacaaggttatgggatgggtgttctctggatttggagtccagggggccagagatgcagcctggctagtgggcatcatgggaggtcaaagaatccatccctctcccttgggcctgggtctacagctgagctgtcttcctggctccattcctctcattccttgcagagccagggaggctggaaattatagtagctggttcactaggactctgtgaagtcaagccatgggccctaactctgcccagaggcattgccctggcctctgaagcatctggcagtctgcttgatctgctacccattttccttctagggcctggagcctcccatacctttggaagttgtagctccaccccttagctgtgaaaccctaggcatctaacatctgtttctcagtttccctgtttgtgaaataataatagtgcatgtttctcagggtgctgtgatgattaaataaggtgctgtaaaaagcacttagcacgtagcctggcccatagtacgtgctagtaaacgggagccatggtgatgccaaggactgttacccatctccaggccaccccatcctagcaatagcctgttagctttggtgggatttggagcctgtggccagcaagtgtgagccttgtctttggccttcctgctactgttgtctggcacagtccctgagtatgcctagcagtgagctacctcgaggggaaggtacccataggcaagtcatttgtgcctaaaggggtacagggatggtggtgcagggtctccagggaggcatgactgaggtggccatgccaggctgggtgcctggagatgggggattctagggagggtccagggctgccatggagcctggtggtgcccctctcaagccagcctgcctgtttatctggagttggactgcctgccagggtttaatgagggaaggcatgtaaaggttttaccacagtgcctggcgtacagcaagtgctcaacaaatctgagctatatttcttctattattaaaagatccaggttggtgggagaaaacggtgctggaattgagacggaggctccttggagtctagctggctcagatggaggcacagccccattgaatgagcatgagctctgtgctctgagccaggctgaagccacacagtcctcacagtccatgcctctcgccggccctcctccccagtgccccaatcccagtcttacattgacacaatgccagagtcagaggggaccccagggatcatagattccaagcgccttgttgtgcccacgacaagtcctgatcccaaaaaggagaagtgtcttatccaaggttgcatgacatgcctggacaccctctggcccccttccccagaatccttgccctcagccacttctcagagtccacactcacatctcctaaggtgtcgatgataacaatggctttcctttactaagggaatttgcatttggttaaggttagggtgagatttaaggagaccaaactcttgagacccaaaggaatgtgttggtaatagtggaattccagtctgcaggagatctgtccacaaagggcggccatccccaagcccctcaacaggaggccaggtagagacttgctgttgtgtctcatctgagcctgtagctttggaagcaccctcatgtgtcagtgactctcagcacttcaaggaacaaaaatgatttagggtgcaggaggggtgtggggagtggaactaaggttgcctggcttgaaacagagcatctccctgggggcagttggggcccagaggccttggccaaggctcctaccactggcctttctcctggcagcttccagaacaatggctgcctgtttgccctgcctgagaaacttcaggcctgatttagtccttagggcagtttgcacttccagatggccttcctcatgtccctgactgctgcccacccctccccctccccctcgcaccgtcccccccgccccccgacccaaccaacccgctcccatcccaaggctcttgacttgatggagggatgtgggaggaagaagggttggtcccagcattcacagcctcacgtgtcaagagacagatctgtgacatcagcatcacatagcacttcttgtctcccccctttccattccactcagccaagaccttgatttcagttgctaagcaacctgtgcctgagtttccaagtgggtcgtcaggtgagcatgagaggtggaaggtatggaggggtagtgcttaaaactctgcaatttatagatggagacactgaggcccagaaagggcaagacacttggtcaaggttgcacagctagttagtgccccatgtgtcagatgattgatcctggcagcaaatgcttcagaaccatcccatttcccactcctccttcccccaccaagagaagcacccagacaacagcaacaccttagagacttcccgtgagaggcttccatctacctagacagggaggcagtgtgcccagtgattaggggtgcagggtctgcatcagctggcctggctttcaaccctgactctaccatttgccagctatgttctttgggcaagttacctaactgatctgtgcctcagtttccttcgctgtagaatgagagacatgctagtcctaaccccgaggctgttctgaggattcagtgaggtgttacataaagcctggaaggtgcctggctcagggcaaacctttcagtgcaagtctgctggtgtgatcctggcttgctgggctctgatgcaccctccccacctagggtccagtccccccgatccccagtttgctcatttatctcatgagaattctgccttaatgttatgaggtcacagatggagtacaaaagtttgcaaactttagtttttaacactgaataattttattcaaataaaacagatgaacttttgggggagtcagggatagatccttttggcagtctagaaaaacccatagaccccttcacagaataaagtttttaagtatacaaaataggattacgcaagaagccaattattttgaaacacaggccaggtacagtggctcacacctgtaatcccagcactttgggaggccaaggtggaaggattgcttgagtgcaggagcttgggaccaacctgggcaacatagcaagacaccatctctacgaaatacaaaaaaattagccaggtgtggtggcatatgctagtagtcccagatactcgggaggctgaggttggagcatcacttgaacccggggaggttgaggctgcagtgagctgtgctcatgccactgcactctagcttaggtgacaaaatgagatcctgtctcaaaaaaaaaaaaaaaaaaaggaaatacagttatcaaaatgtataccagaattgtgctgtaataagtgcttttctatcaatgcattacgccccatgattgagtgtaggacacagtaacgactctaatttcaaagtcatgatgtgcatacatattttgagttaatagtagcagaagttatctgaaaatatctgtgatacctgttgatgaacacattataggttcaagtaatcctgttggggtttgctgcctacatttatacacgaaagaaatgtgaggtttcagttagaggctagtgaaaatatagatgtaagttgtctcctacccagactcacaaacctcctaacagggtctgtggccccactcagattaaagaccttggaaataaaatcagagggaaatattattgtataaaatcaggacaggcagaactgctgtggctgaaagttggtggggagggagcaatgcaatagacctgagcacccttcactcctgtggggctccccaaactcctaagcttcactggcagttaggaaacctagcttctctgcctggttctttgtaaccttgggtgagttcctttgcctttctaggcctcagtttccccatctgtaaaatgagatgttgggcccgttgtcctccaaggtctcgccagctctgacattctgaaactctgtgcttctcctcccctggagacaaaaaccccagaagcttgggtcggtaggagccctggaccagggagagggaacagctggggccaggctggccagctcccaattgttcaatggaggaggagggcgagatgcatggtgctctccaaagcgacagctgggtgagcctggctgggggcctcgtccccgcctgccatctgtgcctccttcctgccttcggccagtgaggggccagtgggggttgtggttggggcctaggccagataacaacctgggtagaagcgggaggggctggccaagaaaatgcagggaagagtctggttgctcactcttgggtgcttaactctttgcacccactccccactttttcccaccctgatctatagaattctggaaaggaagtgatacacagccctaggtccacccgagctgcttaatggctctgtgaccttgggcaagttacttaacctccctgagcttcattcttctttgtccagtagacatcattcctaagacctactctttgggattggaacaaggtgtaaatgaaacagagtagataaagtaccccagctcagtgctgactcagtgccatgggcctgtccaaagagagcttatacctgggactgtgaactgctcccgctgatcagaatgcaacatggaggcctgatgagcccctgtgcagtgtttgtgaagtgctgtcgctgtccccaggcacaggcggctttgcagccagctttctctcctacacgcctttgccccggctgtttctccctctggattgccctcgcccaccaatatccacatgcatacaactctacccacttagaataacttatctatttataaataagtacttatatttaggcaaaaccttcatgcagttggacagtttaaacttcagaagcaaaggacctgcagtggacggtctgcctttcaatcctagcttccagttactcagttcctccagtaggagggaattgctgttagcagttactggagtgtctttcccaaaattatttatatgtacatacttaaacctggaagagtgtgagggataagggcgctgacccctgcaccattgaaaatccacatataactttcaactcccccaaaacttaactctgctgaccagaagccttaccaataacataaacagtcaattaacacatatcttacatgttatatgtgtatatactaaattctcacaataagtcagctagagaaaatgttattaaggaaactgactggacacagtggctcatgcctgtaatcccagcacattgggaggcccaggcaggaagatcacttgaggccaagagttcgagaccagcccaggcaacacagtaagagcccctctctaaaaaaatttttttgattaaatttttaaaaagaaaaccataaggaagagaaaatatatttactattcattaagtggaagtgaatcattataaaagtctatcctcggccagacatggtggctcattcctgtaatcccagcactttgggaggccgaggcggacagatcacctgaggtcaagtgttcaagaccagcctggccaacatggcgaaaccccgtctctactaaaaatacaaaaattagccaggtgtggtggtgcacgcctgtagtcccagctactcagaaggctgaggcaggagaatcactcgaacccgggaggtggaggttgcagtgagccaaggcctgggtgacagagcgagactgtgtttcaaaaaacaaaaaaagtctatcctcatcttcatgctgagtaggctgaaggggaggaggaagaagaggggttggcattgctgtcagaggtggaagtggtggtggaggtggaagggaagacaagagaggcaggcaggcaccctcagtgtaactttacagaaatatatcgtaatttctgtctggctttttcatttctctaaaaatgtttctatatggtaccaattctcctttgaccatgtgcctgtatcatgggagggttcatgtcatgaaagaagtcaagagcagtcttgaataattggacccttctgccagattgtctaatgtcaatttgtttgctggtgctgcttcttctatgtcttcttcctcattgtctggcattgcttcagaagcactcatctccatcaagttgtcttctgttcattcctctagtgtgatgtctgttagctcttaagcttcttcaagattcatatcttttttttggcaggctcttgctctgttgccgtggctggagtgcagtggcatgatcatggctcactgtagcctcaacgtcctgggctcaagtgatgctctcacctcagcctcccaagtagctgggacttcaggtgtgcaccaccacacctggctaatttttttattttttgtagagatggggtttcaccatgttgtccaggctggtcttgaactcctaggctcaagcaatccacccatcttggcttcccaaagtgttgggattacaggtatgagccactgcacccagccaagattcatattttgaacccttcactcctacacaccttttttacatatccacaatctctttcattatttccttgaatggctctgtggtaaatccggtgaggtcatgcacaacatctggacaccgttttctccagtgggaatttattgcctcaggcttgatggctttcacagctttttctgtaacaatgatggtatcttcaactatgtaatccttccagattttcatgttgttctctctatagaggttctctttcttagtgttgacaatcttttccatacagtaccatgtgtaatgtgtaatgagtcttttttttttttctgttttttgagacagacttttgctgtcgcccaggctggagtgcactggagtgatgtcagctcactgcaacctccatctcctgggttcaagcgattctcctgcctcaacctccccagtggctgggattacaggtgcccgccaccatgcccagctaatttttgtatttttagtagagacggggtttcaccatgttggccaggctggtctcgaactcctgtcctcaagtgatccacccacctcggcctcccaaagtgctgggattataggcgtgagccaccgcatctggtcagtaccatgtgtaataagtcttaggagttcttatgatttcctgatctagaggctgaattagaaacattgtgtttaggagcaagttgaactcatggggttctgggtggccagagatattgtccaatatcaaaagaactttaaaaggcagtttttcagggacaaaacattcaaccaatccagaaaaagtgttctggttatccaggccttcttgtacaaagactaccagctggtgttaatcttttcccttcaagacttgggagttagcagctttacagataagggtagtcctgatcataaacctgactacatttgcacaaaacagtagagttagcctacccctttctgccttaaatcctgatgcttgtttcttttcctcactaacaagtgttcttaatggcatatttttccagaacagggcactttcgtctgcattaaaaacctgttcagggcctggcgtggtagctcacgcctgtaatcctagcactttgggaggccgaggcaagtggatctcttgaagtcaggagttcaagaccagcctagccagcatggcaaaaccccatctctactaaaaatacaaaaattagccaggtgtgatggcgtgcacctgtaatcccaggtactcaggaggctgaagcaggagaatcacttgaacccaagtggtggaggtttcagtgagctgagatcatgccattgcactccagcctgggtgacagagtaagaccctgtctcaataaataaataaataaataaattaattaattaataaaaatctgtttaggcagatgtcctttctcttcagtgattttcttaatggcttctaggaactcatctgctgcttcctggttggcagaagctgcttttcctgttatcacgacattttatgagccaattttctttcaaaatgatcaaaccaccctttgctgatgttaaattatctgactttagatcgttcaacttccttttgctttgttttcatataatgatttcaccttttccggaatcatattagaatctataggttatacctttcttatagtaatcctgcacccacataaaagctgtattttcacaatgagataaggtattttgaaaagtgcagggttttcatgcctgctggcataactcaggaataacttcatgaatttccttttatttttttacaatagtccttaagctggattcatttatcttgaaatgaggtctgcagttgtcattcaaggtttacactattgcactaaacacgatgaaaaatacatcaagaacctcaagagatcactttgtattgccatatgcaatttattggagagatgaattgaatcatatacatggagatgattagcctcacatgcattttaagcagatacttgcaacacttgagcttcctgcaatagcaacaagagcaggctacaaaattattacagtagtacagtagatgccacaatttggtgcagttatgacttaatactgtgtcattaacatttgtttacatttttctcaactgcaaatgacaccatgtatgatctgaaagtgtgtgtatgttttgataaatttcagcttcttataatagatttgtatatattttatgccagtaaatgataagacagactagtatctacagatattctatgcatttatgacatacctttttcttaattttttttttcctaaacaggctaacacaggactttttcttaaattttttaaaatatttctaggctacctggtttatcgtgagctttttcaaattgtcgctaaactcaaagaaatttccaatttattgaaaaaaaatctgtggataaatggacccaaacaattcaaacccgtgttgttcagaggtcaatcttttttacacgaagatcaccaactacctacattgttctctctacatcttgcttttttacatgtaattatatatcttggagatcttttcacatcaaatatagaaagagtttccttgctcatttttatagctacacagtattccattgtttggatggtcatcatttgtccagccacattttgcctattgataagtatttccattgtttcttaagtttcactatcatagacagtgctgcagagcataactgtggacacgctttatttcatgtgcatgcaggtacgtctgtagaataaatccctagaatttaaatggatagttgaagaggtacgtgctttcttccaggaaacacacacacatacacgcgcacacacacgcagaagaatttcctcctgacattgtagtaggaagttttcttaacaggacacagaaagcaatagctataaaacaatcaataaattgaacttaatcaaaattaaaaacttttgctcatcgaaagattcattaacaaagtgaaaaggcaagccacagacagaggagcaatatttgcattgcatatatctgacaagggattagtattcataatatgtgactggatttaaaaatgagaaaaaaaagtggacaagacttgaataagcattgcatgaaaatggatatccaaatagccaataggcctgtgaaaaggtactactttcccagagtagtttcaattagcattcttattaagacagaagttgaaatctctttatgtgttaagacctacttgcatttatttttgtgtgaattgtttatatgctttgttcatcattactcaccaggaagatgaaaattaaaaccatgagttactactgtacatccaccagaaaggccaaaatttagaaagctgataatatcaagtgttgatgaggatgaggagcagctggaactctcatactacactgctgggagtgtacagtgttacagccactttggaaaactggatgacagaagtattctacattttgatcatggtggtgggtttatgaatgtacacgtgcaaaaattcaatgagccttacagctaagatctctgtaattttttttttggatacaagtatatcttggttaaaagtttcagagttgggggaaaggtgtgtgcttctgaaatgttgacaaaattgctttccgttgagattgcaataatttatatttgaaccagcaaagtgtaagtgtgcctgttcatttaacctcttaaaaactgagagttattggcggggcatggtggctcacgcttgtaatcccagcactttgggaggccaagacaggcggatcacgaggtcaggagatcgagcccatcctggctaacacagtgaaactccatctccactaaaaatacaaaaaattagccggccatggtggcaggcacctgtagttccagctacttgggaggctgaggcaggagaatggcgtgaacccgggaggcagatcttgcagtgagccaagattgtgccactgtactccagcctgagggacagagcgagactctgtctcaaaaaaaaaccaaaaaccaaaaaacaaaaaaacctgagtgttatcatatgttttaattttttgccaagctgatgagtgggaaactttgtcagagtagtttcaattaacatttttattaaaaatgaggttgaaaatatcgtcgtatgcttacaatctatttgcatttcctttttgtgtgaattgtctgtccatattcttcacctattttttatagggtctttgattaatttcttattgatggaagaagtcctttatatgttagggaaatgagccttttggaatatgagttgcaagtatacgtttcaaatggtactttttgcagtgcagatttatttgtttacatttcaagtatttaagtttaccagtcttttatggcttctggatcttgggccatagttagaaaggctttctctgagattataaagaagtaacctttttactaggcctttcactacttttagaatttcattcttatatttaaatctttggtgcattttgaacttatcttggtgtaaagaatgaggtatagattaactttttttcccccaggtatctatccagttgaaataattccaggtaatgagtaatcctttctttcccctactgatttgagattcaggctttgctgcattctacatttctgaatgtatttgggtttattttacagactgtccattattttctacttaatagtcttgttattcatgtaccagtaccacaatgctgtgttactaagacttcataatatgttttaatatcaacagggatagtcaccactcattgtggtcttttctcaaacgtagttggctcttctagcttatatattttaatatataattttaggatctgcttatatagatagaaaatattgatattttattgggattatgttaaattgataaattaaagagaatgtcaaccttatgatgttgagtctaaatatccatgatcatagtttactttttgtagtcctttgtgtccttttgtggtgtattaaaagcttcttcacatagctcttattcatttcttgttacacgtatttaccttttttattgtattatatatccttttaaaattatatttgctaattgatgattgtatactagaaagccataagtttctgtatgttaatattttgccatgttactaaattcacaaatagcttatactaattttcagtggtttctcttgaggtttctagggatactattttatcatttgcaagtagtgataattctcctcttcatttatagcttttatacctctggtatatctttctttttttaattgcattggcaggtcctacaggaaaatgttaaatcatagcaacctcttgttcctaactttgatggcaatgcatcaggtatttaccttttacatattttgggttgagaaatattttccccccagcattttattattaaactttcaaacatactgcaaagtttaaatcatttagcagtgaacaccacctagattaatggtattaacagcttgctgtacttctcaaagctgagtgtcctatttgtttgaggtagagaagaggctcgaacagataattctttgggaacattctgggtagcggacataaaacctggcacatggcaagtcaacagatgatgctcagatatgcaaatactgaaagtgaggccccaggcagctagttccctttccaaggtgtcacgaggtgtcagaagtagggaagagcccagatttaggacataaggtgggtagggtgattctcagatgagaggaggcaaaggatgaaggcctcccccagtccccagtgttctgaactccacaggacccagggagtgggtgagtggccttccaggacaccattctttcctgacagctggcgggaatttcctttctctttctttctgtctactactccttccctgctggctcctcctggcagagccccagacaaagaaagagaagtggcctgagcaggtgcttccctcctcccctgaatgagctcttcctggagagcgagggtggagaaagcagggcggctgtgggcactgggggttggggtgttgtgttgggggatgggcagggaaggggccaagggagttttgtgcctctctaagcccatgtgctggacagggccttgatgttgtcctttcttatctacactattgcaatcactgcactgagtccccaaaaatgataaaaatacacggttttgtagtcaggcagatttgggttcagcgagatcagcgtgttcagggtggtatggccgtagaccagccaaatctaggcattgccagaaacctgccgcatgcccttgggtgagatttggctctgggctccttcctgggcagtgagaggatctgtggctcagctgcagcacaggtgaggagcaaagaagaccctcgacaaacaggccctaggcttccctctccccaggctccccgctcctgatctcccttcactctcatgctcccccacccctactctaaaaacccctaaggcctccctttctggatgaagtcctgccccaccctggctccatggcttggcccactctgccccttcctgactcacctgccctcaccagaccttgagccagccccggtctcttctacctgcctgcccttcttcatgctcctctctgcacagctcagggcaccgcctccaggaagccacctggagccatcctgcttcttcctctgctttgccaacagactctccgcttcctgccatgtccttgccatgtttgaggcaggggtatcgtggtctgttttcacacctgttcctgcttctaggcgatgggctccttgaggctgggaaacacacccattcgtttttccattcccaacagccagagttcagcccaaatactggacagggatcttttcggacagagaaatcttttgaggcccagggtgcagatgagtcttggccaaagccccacatctgcctgatggcaaagctttggatttaaaaccctgcgtgaggagtgggacgggtgaggccctgtggataagccaggtttgcactgggcctctctattcactacctcccccttctcagcctcagtttccccatctgtgagatgggagagtgcactgaagatgggcggggggatgtggaggaatgctgaaagagctagttctatgttttagtggagggagttgctggaaaggaaagagacttcagaccagttacttccatctctggaaatagaatatggggcagtgaagaccatgggcttcgggacctgtagtcctgacccagccatttgctagatgagttattactcccgaaagccttggatttcttatttgtaaacgagagataataaatcccacctggcagggttgtcatgatgacagtaatcacccacacctgttgaacacgtacaacgggccagggactgttctaagctcttgagacgcctggtgccactgaatactcagcaaccttgcagatgaggaaacaggtatagcttatacaaagtcgcacagctgggaagtgctggaactggaataaaatagagtgatgctggctaagagtttagcaccatgcctgacacacagtgagcctcggtcagcgagagggcctaggtcatctgccccacaacgtgttcacacttgcaacctgcaggcatggcccagggctggggaggggggcgctacaggggatccaagaaccttctggatcatgcagacaacacagacaaggtccctgttctcaggagttgtgtgagccagtcaggagacaaacaatgaacaagggcgcaaacagtcgttaagattacatcagacagtgatgggtgctgtgaagaaatccaacacagtgatgccgtagagacttgtgatggatatgttaggtaagacagtccgaaggacctctctgcaaacttgaatgggatggagccggtcaagtaaagagcatgcggaagagtagtgccctagaaagagagaatagcatgtgctgaggcccagggcggggagccccagggtgggaagccaatggtagtcaggggctgggctacccagaaccttggagaccacgccagtttggattttcttctaggtgatgtgggaagccattggagggtttcaagctcaaggttagctctcacttgagctaaacaaagaaatatggtaacaacacaccccatagaaagccaaagacaggccgagcatggtggctcacgcctgtaatcccagcactttgggaggccgaggtgggtagatcacctgaggtcaggagttcgagactagcctgaccaacgtgcagaaaccccatctctactaaaaatacaaaattagctgggcgtggtggcatgtgcctgtaatcccaactactcgggaggctgaagcagcagaattgcttgaacctgggaggcagaggttgcggtgagccaagaccacaccactgcactcctccatcagaaagaaagagagaaagagagagagagagagagaaagaaggaaggaaggaaggaaggagggaaggaaggaaagagaaagaaaggaaagaagaaagaaaaagaaaagaaagaaagaaaagaaaagaaagaaaggaagcaagcaagcaagcaagcaagccggagacaggactcggccttgagaagcagggagccctgttcacgcccagaccatggcctgttcactgtgctgaggtgaaggcgacttggagcctttatctctcaggacacaactgggtgtgtgaaatccacacgggcatcttggcacctctgcagttgggcagattccctaaagggaacagggaatcttgctggccagggccaaggtgggaagtggctgtgaagagtgtggtcagttttccagcctggtgggtgggatgtgttctctgactgaaattgcagtatgctttgcgtgaatgcatgagtgggccagggctaggacagccaagaagagcaatctattcccgggactgaccttgacttttggcctcactttcgttgagctcaatgggcaatgctggctctgagttagctgtgagtttcaggaaaaaaaaattcaactttctaaaaatatcaatccaatggtgggttttgggctcaacaaagaaacccctgacagtttcctgttaataaaataaatatatttttcttggagaaataaaccaaataagaaaaaataaataaggctgggtgtggtggctcatgcctataatcccagcacttcaggaggccaaggtgggtggatcacttgaggtcaggacttcgagaccagcctggccaacatggtgaaaccctatctctactaaaaatacaaaaattagccaggcatgatggcgcatgcctgtaatcccagctactcaggaggctgaggcaagagaattgcttgaacctaggagacagaggttgcagtgagccaagatcatgccactgcactctagcctgggtgacagagcaagactctgtctcagaaaaaaaaaagggggggaaaaataaagaaaaatttaaaaatttttgaaaaattatgtatagataaccaactagtagaggtctggatcagaatcaagatggcaaagcagaagtacttagtggtttgttttgttttgagacaggatctggctttgttgcccaggctggagtgcagtggcgtgatattagctcactgcaacctccacccgctgggtttaagctatcctaccacctcagcctcccaagtagctgggacttcaggtgtgcaccactaagcctggttaattttttaattttttttggtagagacagggtttcactgtgttgtctaggctgatctcttgaaatcctgggctcaagtgatcctcctgcctcagcctctcaaagtgctgggattacaggcatgagccatcgcgcccagccagcaaaaatatttagaatcattagtttccgtagatggatcagaagtgaaaaggggcaatgaatgtgataaggaactaatacacagaattaatatctctgatatacaaagagctcttataaattattaagaaaaagataaacaccaatacaccattaggaaataattgaggacctcatagaatcagaagattcacaagcaaataaatgcaaatatctgctaagcaaatgaagatataagcaaccttacaaagcatcaaagacttgcaaaggaaaacaatgagatatttttcatctgaaaataagcagataaaaatattataatattgggtgctgtcagggttatagggaaatggccattctcttgagttgctgacaggagtgtaaattagtacaaccattgtgaaaggcatcttaaaattcataacaaaagcatttttttaaagtgcagatctattacctagcattttcacttacaataatttatctttttaaaaattcatgtgtggaagaattcagctactatgtttgcctcagcctttttagagtattggaaattataaagcacttatggatccaaaagtagggaattgcataaggtattgtagtacagccacactgaggaatacaacgcagccgtgaaaatcatgctgttcaagaatgttcaatggcacaggaaaaggaaccacaaccactctctccagctgggcataaaatggagctgatactcaccacgacataataggaattattcttcctctgtatttcccaatttttctgttgttgtttttttttcctactttcttaaaaagtgaagaggaatcttctggaatgtcagggactgtgcccacagtttgagacccaggaaaattggctcaacatccctgttggctgtagacccacatatgagccaaagcctcacccacatggcttacctgcctcagtttcccatatcaaaatctgagatgataatgcctgttctgcctccctcacaacaaatagaaaatatagctgtgttaatgttctgttgttgcataacaaattaccccaaaatgtggctgggtagttctggttcagggtctcatttggttgcgttaaagctgtcggccagggctgcagtcatctgaaggctcgactggggaatatacacttccaagctcattcttgcagctattggcaggaggcctcacttccttgcaggctgttggccagagacctcagtccctcacacctggtctctccataggctaagtgttctcactcatggcagctggcctcctctgagtggtgatccaggtgagagcaagagagcccaggcagaaactggaatcttgtgtaaccctggccacattctattagtaacacagaccaaccctggtgcaatatgggaggggactacacaaggcatgtatactaggaggtgagattacaggagaccatcccagggttaaagtgcttaacagggaaaggtgtgttctaaggggcagtcaggggctatccataagctcccaaagttctgactgtgcccagcttttttggaagcccttgagagcatgatggggcccacaggaatagtgaaccggggtgaaaagatcccactccacttgttcgctgagtgcagcatggggaagatttatatctaaagtaacagcaactatccctgagcaacttggtaatcgggaggtgtgtgtgtgtgtgtgtgtgtgtgtacttttttggtgtttttcaagtcatcttctttgagtatgcataattttctggtttttaaaaattttttgagacagaatctcactctgtcgcccaggctggggtgcagtggtacaatcatagctcactgcagcctcagtctcctggaatcaagtgatcctcccacctcagcctcccaaagtgctgggattacaggcatgagccaagtacatagaatgtttgtataacagccgggacatagatgtgcaccaccatgcctggctaatttttgtgtgtgtacagatggggtctcactatgttgcccaggctgatcttgaactcctggactctagcaattctcttatctcggccttccaaagtgctgggattacagacgtgagccaagtataatacacatcatttttgaagttaaaacagaaatgtctgaggacagtgaattcatctgactctcaaaagagactgcaagtgatacagtggctcagctttggaagtgaagaaatggtgcctctagaaccaggaagaatcctgttctgggatggagtggcctagggagaggtggagagggaggagatacatcaggcagcaaaccaggccccttaggttatgaggcagggacctgccaccccatgagcctgcccctccccacccccaccaagtggccagggactgcaggtgggatgtgagagccacataatgtgagctcggcgaccttagagcagcccctcacatcacagtttggatcagatgcgcctaatggggggtaccagggtgtggggtatgggttgaagatgagatcaggtgcaggtggatgtgaggacatagcaggcaggagaacccacacccccagggaaagggtctacaaacaagttgtagcttacaggggtggtgaatgggggccactgtgagtgctggaaacctaagccggtaggtgggtggtggaagtgcagagtctgccctcttctgcccttcagcagtaactgaaaggggtgtcatttggaatgtcagagttggaaggagcctcagaattgattgggatccatcaatctcttaaagatgagaaagaaagaggaggtcgggcacaatggctcacgtctatgataccagcattttggaaggctgaggtgggaggattgcttgagcccaggagttccaaaccagcctgggcaaccctgtctctcaaatgaaaaaaataaaaaattagccaagcatgcctgagtccggctacttgggaggctgaggtaggagaattgcttgagactggacagtcgaggctgcagtaaactatgatcatgccactgtactctggcctgggcacacagagtgagacactgtctcaataaaataaaattttcttaaaaaaggaaagtgtcttggccgggctccgtggcacatgcctgtaatcccagcactttaggaggccaaggcaggcgaatcacttaaggtcaggagttcgagaccagctggccaacatagtgaaaccccgtttctactaaaaatacaaaaattagccaggcgtggtggcatgcgcctgtaatcccagctactcaggaggctgaggcaggagaatcacctgaacgggggagacagagtttgcagtgagccgagatggcgccactgcactccagcctgggcaacagagcgagactccgtctaaaaaaaaaaaaaaaaaaaaaaaggacagtgtcccgctaagacccacagcaccgtgggtgactaactaggaaagggactccagctcccaagagctgacaaataaaagaagggttgactttttcggtggacccagaagcagcagtaggagcttatggcaaaagttagaaggaggcggattttcatctcattatgaagaattttctaagtgatgggcacagttgtgagctggggttgactgggagcgggagagaggctgcgtgtgtgtctcgggtcctggtcggctcagttccctcccacagagtctaagagcttggatgtggctgagagtagcgcagccaccgccctctgctggtggaatgctggtagcacagctttcctgcttggccacgatgctgccctctggctaggcgaggctttccagagaagaagcaaccctttggggtctgagagctccctgctgggggcttcgggacggtgggtagtatatattctctgcacacatgtgcccggaagacagacgaggccatcagaatgcccgccagtgtctgtaactcgggactgaagccagcgaatgccccaggtgattgtgtgccctgggtcttcaggtgaccctgctgccccttcctgtgagcaaggtctccagaactgacaggtgggatggggcactggcctgggtgtctgcaaacctgggtgtggcctggcacagccatcaccctcttactcactgggtgacctcaagcaagtgccctccccaaactggacttgcactggcggtggggtggaagagtaggggccctgaccgccagagaaaggctcgtgggcagtggcttctccgtggagcacacgcgaagaacatcaaactcagcagtgctccatgacctcaccaggcagggttggagtaagagtttgccctgatcccaactaccttattccctctttctccctccagcctttccaccagtgccctcatgctcttttccctcagacctgccttcaggaatattctcaaagcttattcagaatgagtccacagtgaccaatattatctcccactacactctctttaggggtatttttattttattttgagagcagcaaggtggagcacgaaaggaatgaatccctaatagtagaacttcaggtatcagtcagctagagagtcagagattcttttataaggcaaaaagacttaggcaagaagaaagaggaactcttcccccttccttttgtactggtcagaccacaggctggaactacagtattgttctcagctccgtgagccacactgaaattgggaaatagagcagaaggtaatctgaagaaggcagccatgatggcgaaaatacttctagtccagcatgaattggaatgtttgtaccccgcttcagcatgctctggaattccccttgcggcagctgcctcccattttgctgtcagtcattcatgaggatttcacagtaactttgaggacaggaaacaagctgtgtcaattccctttcctcggtcagttcagcctctgcttgggcctttggagctgtctcttcctctagctcaccttcccagggaaagtaaagcctctgagggcaggaatagcatcttctaggcagaggaggggtatcctgtgtctggaaagaaatggggacttgaggaggtaggaggtgaagttgtaaattctagtttgagctttgccacttagttgctgcgtgatcttgagcaagaccatgaacccttctgagcctctgttgtctcatctctgaagttagggaaatgataactcctccacagaggtagtgagactcaaataagatgtttatagatctatttttgtaaaaccaaggtcatggagatcataacaagttagtacatatttaaagtgcttagaaaacattaacacattgtaggttctctgtaaatgttagctgcaattccacctcctggaagagagaatttattcacttaacaaatttttactgagcaccttctctgtacccggcactgtgggaagcactggggacccagcagtgaacaaaacagacaaaaaccccagccttcatggggcctacacgctagcggaggagacagataataaagtggattatagggtataatatagtataataatagaacagaaatggaatagaatatagaatagaatagaataatgctaggaggagaaattgattagggaaggggacaggggtgtgggcaggtggaggggtggctgaatttaaatacagtggtcagggaatctgataggctcagcttgagttagacgctcatcctggcccaatcagctgtgtgtttgtgtgtgcaagggcacagtgtgggcagataaggatatctgattggctcagcttgaattagatgcccattatgatccaatcagtttagcgtgtgtgtgctggcagtggcccacacttgtggtgctaacatgactgctagcgtccgcatctgtgggtgagggacataggagtcatgatgagctgcacaaaccctccagaggattctgaattgaagcaggacttctgcctcctggcccaccttagcctttaatttccgggggccaatctagcttcaggtcaccttcctcagctgtcaggactgaggtgccagagggtaaggggtctgcaaggataaccaccgctgcctaaacccgtcaaatgccagacacctccatacactgtccctgttcccctgtgacatggggctgctattctcagaaagctgcagaggcaggacttgaactagagtccatgagactctcaagctggagtgcaggtctcagccgtgtttcccaagtcctgctgtcacctctgtgctagcatgcgcacaccgcagccacctgaggagagtgtttaaaatgcttgttcccagaggccttgacctgactcaggaggtctagaggtggcccaagatctgtgttttttgtttcttctggattatttttttttttaagacagagtcatgctctgtcacccagggtggagtacagtggcaccatcacgactcactgcagtctctacttcctggatcaatggaccctcccacatcagcctccccaagtagctgggaccagaggtgtgcaccaccatgcctggctaattttttttcttttttttgtagagacaggtttcactgtgctgcccaggctggtcttgaactcctgtgttcaagtgatcctcccatttcagcctcccaaaatgctgggattacaggcatgagccacggtgcccagtccaagacctgtttttgcagcactttcgggactgtgctccccgccaggcctggagccccggaggcacaccctccctctcctccaagccatctgtcagtgctccctcttcctctccaaagcttgctcctctgcccttcctgcaaagctcccaattgaaccccaagccccatcactatatttgcagggtgcactgctggtcattcccactgggcctgagcagagactgcaagtaagaaaattccagaacctcaaaggtcaccccgcacaaagccccattgtacagatgatacagatgaggcccagacagggatagggctagctgaaggccacacagcagagggtggagctgagaccctctccctgtcatgcaatggctaaggacaagggcccctctctgccacagagaaagcatttccttgggcagctgggaggcagcttttctgggaaaggccagatggtggcggggggatgctgaggctgtgctccaggggttttcagggatttgcttggagaggcaaaggttacttgggagcggaccttcaaaacctccatgggcaggaagaaaatagctgtctttgtcataggccttggtgacttcgtgttgggaaattgtccaccctgtgccagcccctgtccattctgcagataaaacaaccctaccaggttggagggttcctcacccactgcccagccccattctgtgtgtctcctgcctcccctctcctgatatgtctgttcctgccttcaccctctccttcaccatagctgggtggccaagtcccctctactgtgtcaagaacaggtcctgatcccctggttcagccagccacaggctctctgcagccatggaaaaacatgaacgttggctggattgagggtttcctgttatttcatgaaaatctcctgcctctcggaggcctggtggggcccagccccctggcccaggaggctgccttgcccctccataattaacaggagctctcctttcccctgcaaggtctgttgcttcctgacaaaggcctaacatgcacttgactttccccccagatgacttgtacagcacccgtgccactggctgctggctgttcctacaacactggcggggttaggacctttcccactgagtctgggaggacagcagacccaggtcctgttgtcagagaaggagtcaggcagaacagcctagcactccatagtaagagcagggggaggaggaggaggaattccccaatttctgtgtcagtgtgagccctttctcccctccctcacactgagcccccagaagggtgccccaggcctgtcgggcaataacagagaaaagacagcaggcggtggttcacacctgtaatcccaacactttgggaggccgacttgggcagatcacctgaggtcaggagttcaagaccagcctggccaacatggtgaaaccccatctctactaaaaatacaaaaattagccaggtgaggtggtgggtgcctgttatcccagctactcagtggactgaggcaggagaatcatttgaacccaggagacagaggttgcagtgagctgagattgtgccactgtactccagcctgggcaaaagagcgagactccacttcaaaaaagaaaaaagaaaacaaaagaaggcagctgagcgtgtccagggatcagcaggtggcatagccagcaccaggctcagaagagctgcccacaccatgtcccctgggagccccaaactcaggcaccacacacccaaactccagccttcattgccggtcctccagtgctcagatagggaagaactagagtagaaaatgtagccccaggttactggacagatagtggatctggctagaggccaggggaccgctgtactcagggtgtgttcccctccctgcccctccagcagcccaacttggcttgacagtaggacccagtccctgacctggccctccgagctggtcaggcagagtgagggccttcccagaaatatcacctgcttctcactcgtggatgagttcagtagatatttattgagactctactatgggcctggcaccgtgctgggtgttgggatacagtagtgactaaaacagacagaatgtggtggaagtgacatccaagggaatcatcccatcttattcatctctaggtggccagctccaggcccagggagggttcttgtctgtgtttggtgagctgggtggagattcaacatataaccccagactggcagagctggaagggccctgatggttcaggtccactgtgcagacactttctgagcacatgcaccggggcagctggccatgctaggcctgtacaaagatgggttagacacataccccacccatggaaagctcacccttggtgagggtgacagccatgacagccattaagcacagtacaaaggagggtctggtccgaggggctgtgcagagcacagaggcagagggaggaagctaacctgcattttgcagatgataataataactaccatttatcgagtgcttctgtggtgccaggccccgtgcccagtgagtttgtatttattggctcatgtggaaactgaagccctgggaggaaggaacttgctcagtcagtcattagcgtgagctgagccaaagtagaccctgacttctaggggttcggagtgcaatatgttccttctcccactaccccagcccctgaggatcaaccaacctccacagatgcagcagagagaaagcttgggatggggagggactggtcatctcagcatggggctgttcacttacaatgtaaaggacattttcaaggccatagattcccagggtcattacctcggaggtggtgcatctccttctctggccccttacatatccctgatggagcaaggctgaagttctgagccagaggtcccctgccctgcccacagattccatgacttccatggggacagtgatggcccagggctgagtctctatggtgtctgggcagggaagatggtgggcactgggcccccgcagagtgtgcacgctcttggtggatggcggttctctcggtggctatccctaagaggcaaggcagagtggcccagcctgggagcatgtggatggtgccatgtgactcactcccacttcaatgacaacagtatctttgcagctggcagcatgtggctgggggagtcatttgatcctgaatatagactggcattgtgtttgagaccagagggtgtaagaagcatgtctgtaccactgaggtttcattcatgtctcacactctgctggaaaccctccatgattatctcatttaagatgaaagtgtggataatctcttgggagggcaacaaacacccgtgaaataaagcaaacaacgcaagacaatgctaaatggagaagcaggacagtgtcatggttaggcccagagcacaacagaaggctctgcaccatgcaaatggtacccccttgagttgtgcagtgtacagtccatgcaactgtacaggggatcctgattaggtccaccgtctatggcatcattaattcaacacaatttggtgagagcttaccatttgtgtccagcacgattccagacactggggttatagcagaggacaagacagagcaccaccctgcatggagcttacattctaatttgaaggtcagaaagactaagggttgcatcctggctttgccgctgtgttagttaatctcactaagcttcagtttcctcatctgcaaaatggacacaatgacctgtacttcgtaaggttattgtgctaaaaaattgaaataacacttggcttcaggtctgacccatgggaagccctcagtaaatgacagccagcatgatcacaaatgctgtgggaagaagggcttagaaaagcttagggaaaaggggccgggcgcggtggctcacgcctgtaataccagcactttgggaggctgaggtaggcagatcgcctgaggtcaagagttctagaccagcctggccaacatggtgaaaccctgtctctacaaaaatacaaaaattagccgggcatgatggcaggtgcctgtaatcccagctactcgcgaacctgaggcaggagaatcgcttgaacccagaaggaggaggttgcagtgagctgagatcgtgccattgcactctagcctgggcgagagagcaagatctccctccatctcaaaaaaaaatttttttttggaaagaaaagctgagggaaaaggaagaccacaagatgtgaagtgcactaaatcgtctcagtgggagcaggagttggggcgtctcttgaggggtgcagaagcccagaggagcaggcctttctaaagaccgtgtcacaaggaatgcagggagggggccagtgaggagccccctgatttgggggccatattttcccaaaccaagggttaggacacccatgatctggcagagaagttctgtgtttctgtcagagaagaagtctgggaaaaggtggtcatccaaatattgggattgggggagataatcaccattttcataggacctgagacatcacatttaaaattgggtctgtcacacttgagaagtgtgacccctgtagggttgagcaaaccaaagaataaggttagagggcagttgggggtgggaacagggtgtgcgtgcccctcgagggccaggcaggtaagtcagatctgataagacagagaaaggggagctgactaagtcaggattcctgctgcacactggctgagtggcccaaatctctgtctctaggtctcagtttctgtctctgaaaagcggagacattgttgaggagcagagataacacagatgtagttatctgttgctagcaacagaaatcacccccaaccccagtcctcttatgcagaaagggtttaggggcttcatagatttaaagggctagagctgggacagtggagagccagacttggaaccagatcagcaccaagacagctccggagggcccagtcccagcccaccctgggtaggagtctgattggccaaacccagtcccatgccccgtccctggatagcagaggaccctgggtaggaggaacccctgcttcagctttcatggtagggcactgcatcccaccaggacagcccacagagggagagtcctccaaatcaggaagggggcttggatgcccaactgccaaaaaatcctgcagatagttatgtatgccatggaagattctggaagagttgcacaaggaaagtaataattatagaaagccaatcttgctctggagttcgagaagagaccagcaccgtggagaccaattagaagactggagtgcctcaggaaggctatgggcagggtgcacctggagaggaaggagcagatgtaaaggcgtttgtggggattaacccatcagaggcctctgggaatcctctctgactacagagaggtacagggagtctcagaggcttagcaaggggctcaggatgtttacagctgtcagggctctaagagatcacatggccgcagattgacattctctgatcgactggtagggactccctagatgctgtgctgaggactgctgggctcaggcaggactcagtgagcgattggtaatgcctgttatagatagagaaaccccaggaggggcaaggataccatgtttattatccctgccccccaaaaatgcctcacttttcggagggagagactgagacctagagagacagagattcaggccactcagccagtgtgcagcagagctgagatgaaaacccaggtcccctgaatcccagagtgctgccctgctgctgtagcagtgctttagtaatgctccccaaatcccaggtgggctgggcaaaaatcacaactcaaaatgagtttcctttcacactacaggagaggtgtgtggaattggggtgttacaggaagggcacctggtgggagagtcctcttttccctcctcgttccttgggccaaatggcgaacagaaggaggggtttttataattttggcagcggcccatgcacacaggagaagttctggtgggtcctctattgagagggcccctggtatggcagaaacccaggcctctgggccaaaaagcgaagggcagacttaggaacctgctcctgaccttgacggagctccacccgcccagggtcctccatgcctatatctctctctaggccacccccagttgggatagattcctctagggaggggttcctgatgttcaggaaggcctctggtggggagcctgaaggacgaaggcctgtttggggtccagccatgggaagatactgaagaccccagagctgactctcttgttggtccagaccccgcgtccccagcactcccacctgcttggagagcatggctctgtggcgggggaggagaaagccaatgctagtgatgacagcctcgagatggtgcaagcactgtccttttcttttgattttctgcctaaaccagaaatgtgctttttccacaatttgcatagatgctgtcatgtaacttttttttgccactgctcgcatttccaacagttacagttttggtgcaccacccctccccccactgtaggatattgagacatcatggtgggactggatattgggagcctcaccttccctctgcagtatccctacccatcacatttaaggcctcgaatgctgggaagcagggatgtcaccatctcaggacacacctgcctcacctccctccctgcagagcatgttctacctctcggcaagagagtgtggccttggtcaagaccactgtcatcatggtgctcacagcctggtggcagggatgaaccaggaaccaaaggtccctcagtgaggaaggagcattggaggtggaggtgtataaccatgggcatggcatgggcagtagactgagggagagtgtcaaggcaggactgtgctgggatgacaacagctctgatgcctggataaggagtttggcttataaggtctagatagtagggacccattgaagattttggagctggggagttatttcatcagagctgcatcctaggaaaattaggcaacagtgtgtaaggtggattggagagagaactgaaaagagcagacattacagggaaggagataaaccagtgggcccacttcagaaatcctgccagctctagagtgaataaagcctttgactcaaaatagatgtcctagaagtctgcctgagagtctaaaaaccccaggagattacacttttgggccaagcagctttctctaaaaggctcctgtcaatatgtacatagatgacccgcaaggagaaatggactaacccaatgtcccccagtcctctttggaaggcttttgtttacttgattaattggccaaagcaagcagggtcctgaaataggggacatgagacaagtaagtcttgattgggatggagggagagaaagaacacagccagaggccagggcagaaaggaccacaggagaggagcttgtatggcacgtacatatgtgtgtgtgtgttcacttgcacatgcaagcatatacatgtgtatgttgcggacagtcactggaaaatagggaacaccctgcagtggagcaggcagcactttggatgaaggacatccatgtttaggaacatgagaccccctcccgcccctgcatatgcagggctctgagcctgcataaactcattctggttctgtcactgccaagtggtgtgaccaggggcaagtgtccttatttagtttatctgggtaacactaattaagataatgtctgtgcaagtgttgagggttgtgcaaatgtgagttgggggcaaagcctccttcaggcccgggagcctgggacacagggagcccgatctctgcccaggactctgggggagaaggactacaatacctgttttataatgactctctctcttttaatatcaacttccagtcatagaagagagagccaggaagactataagcaacctaatcagatggtctggaatgcatggggcagcacacagtgagggaaagtgatgataggggtggcccatgaaaaaacatctttcatactgaggcttgggattccagcagtaaatcacccatctgctgggttcagcatgatccactgccctcggtactcctttacatgctcatcacctaatgtgacttctgtcttcctatttgctttacctgtggtttctacaaataagcctgtattaaatgtgcatgataatgttcttaattttgtttcgggagacagtcttactttgttgcccaggctggagtgcaggggtgcaatctccgctcacttcaacctcctcctcctgggttcaagccattctcatgcctcagcctcccaagtagctgggattacaggcacgtgtcaccacatccagctaatttttgtattttttagtaaagatgggattttgccatgttgcccaggctggtctcacactcctgaggtcaggtgatctgcccaccttggcctcccaaagtgctgggattacaggcgtgagccaccgtgcccagctgataatgttttgaattgctcaccctccccaacatgagacaagaccaaccttcagctgctgactcttagaatgcacaagtatttcaggtgctccaggaggcaggaggcccaggccccagcaggctatggagcctctagggtagtggttcccagtctttgctgctcattgaaatcaatccgggaaacccattaaaaataccaatgcctggctcctgcctctcagatattgggattaaattgatatttaattgtttgattgattaaacactttattttattgataatttaactgataagttgatattgctcactgggcattgggattacttaaactcccaggtgattctaaaatgtagccaagtttggcaagctctaggcggaggagagagacagggtgagaaaaagagtaggaagggagggtctccaagaacaaatctaaggggcttcgcaactgagctgccgccgaccccttgtgggaaccgcactagaaatgttgagctcctacttctgtttttttttttttttttcttttttttttttttttgagacggagttttactcctattgcccaggctggagtgcaatggcgcaaccttggctcattgcaaccttcacctcccgagtcaagtgattctcctgcctcagcctcccgagtagctgggattataggcatgtgccaccacgcctggctaattttgtagttttggtagagagggggttctgtcacgttggccaggctggtctcgaactcctgacctcaggtgatctgcctgcctcggcctcccaaagtgctgggattacaggagtgagccaccacgcccggcttcatacactgatttctaatgactttcctccctgatttacttggtgtctcatctacatcctgaaacagaagccagcatagcagagatgccttagaggcagacagccaagtgcagatgatagctcctcacttcccagacaagtcaccttgggcaagtcgcctcccagagctcagtgtctcatccataaaatgaactgttaccagaggactataaggatttaataaaaccttatagggttgttacaaggattaaatttttaaatgtatataaattgcttaacacggccaggtacagtggctcacgcctgtaatcccagcactttgggaggttgaggcgggtggatcacctgaggtcaggagttcaagaccagcctgatcgacatggtgaaaccccgtctctactaaaaatacaaaaattagctgggcatagtggcacatgcctataatcccagctacttgggaggctgaggcagaagaatcgcttgaacccaggcggcggaggtcaccgtgagccaagatcgcaccattgcaccccagcctgcgcaacaagagcgaaactccgtctcaaaaaaaaaaaaagaaaataaaaaaatgaaaaaattgcttaacacaaggcctagcactttgcactcactcatcaaatagtctttggttatcactattgtcttcttcacagttgttctggcattgccatctcacatctttctcatgtggactcaatatggattcctgtgttctgtgctggtacactggaagcatggcactctgtggttgcaggtgtgtcttgcttcataaagtaaaaaggggagccatgaaaaagcagcaagggtatcagaccagggtctgggaatctgggaagcccagagaggccaggggttatgttcaaggtcactgggccagtgagtgccggaaccgggtgtggaaatcctacctcctgctcagtctgttctttctgcctcgctaagctgattctctaggtaagaaaacattttgcttccatgtacaaaattcagctctgcagtgatgggagaatctaggaagctgaagctgcaatgcaggttggtttgaaactgtctcatccccagtcagttcactgggttcagataaatcctggacaggggttgagagtacccactgctcccctggacagcctgctgggtgagccacacccgtggactcaccatgccgccagcctttccaagggagggcccggccatggctgcctgagtgcatgccacacacacacactgaaatgcactttcaattaactatataattttatttaatttcaaagatgtattttccctggtcttattctgttttatgttgctgggcacatttacaataaacagaaatttatttggtttacggttctggaagctgggaagtcaaagagcacgatgcaggcatctggcaacggccttcctgctatgacatcccatggcagaaggtggagggcaagagagatagagcaagagaagaccaaactcacttttataacaaacccactcacaagacaactaacccactcccaagataaagacattaatccatgcatgagggcacagccctcatgacctaatcacctcttataaccacttcccaacactgtagcattggagactaagtttccaacacatgaactctggggaacatgttcaagccatagcaccctccagaccatccattggtaacaagggtgtagagaaacctgtatgaacaaatacattgatgttgcacaaaagcttttgaaacttgcaaatctggtaggcaccagtctgcatattatttcttcaagaactgtttgcttgaaaccagagaggaatatttttcaatcaaggctatgggaggtgtgttttttgtaataatatctgtttttttaataacaattttatatgtttgttagaattggaagctgctagtaatatccaactattcagatgttgtcactattagcattctgatgtattttcttgtagattggtttttttagatagggatccttttatatgcaggttgagcattctaaatccaaaaacccaaaatccaaaatgctccaaaatctgaaacttcttgatcaccaacatgatgctcaaagtgaatgctctttgaagcactttagattttggattttcagatctgggatgctcaaccagtaagtaaaatgcaaatatttcaaaatctgaaaaaaaaatcaaaatctgaaatacttctggtcccaagcactttggatatggaatactcaaactgtatagaacttgattctgttttactaagcgtagatctttagcaatgctcatgccactaaatattctttgaatatatgatcttaaatgacctcagaatattccattatatgggtgtactgtaatttattttgacaatgtccccattgctgtccctatgataaataacatggcagtgactgtttcagtgtgcttctctgttgatttccctggggtaagttcctgaagcagaattattggtcaaaggtcatgaaccttttaaaagtgttggagaggttctgtcaaatggatctccggagaaggtgccctacttcacactcccactcatcctggagcagggcgtccatgccctcctcctggggctggggatcaggttgtatctcaaagacaccctatctgccaataactctgtctgttggcattggcacacagggtgtatttgagatacaacctgatccccagccccgagctcttccttgggaagactcagggtacacaacagctgcgattcaacatttgacattgaagttctgtcccagcaccaagaagggctggacttgttctgtgagccctccaggataatgcccacaagaacagggtgaagatctccctaagggttatagactccaaagaataggtctcttcctccaccctccaccccaggcagcaaggtctctgccccagctctgttgagactgaagttctctgaggttctctaaccagatggcaggttagagccctggacctccgagaaccctacccctgggacaattctgtgagccgaccatctgaacagtcattgtacagtcatggaacattgaaaaatcttgactccatagaagctcactaaatctctgttttcttagttgtaaaatgggcttgttatgaggattaaatttgattatatttgtaaatcaatataaatgtgtttatattaatatgctattatattatcaatagccatgtgttagtgttggtgttagtgtattagtgtattagtatgaagcatgagaaaacagtattgtgtagcagttaggagccaggcttcagtgacagacaggaccaagtttggtctccggtcacaccccctgtacagaaacagtaacttgtacaacagaggcatatgtgggacttggggagaagattgctgacattttttaaaaatttacaatcagcttcctttagaacatttggcagaggcattttgtttgttctttaatttttatgtttgttaaagtaataaatgtgcagaggtcagaaggtctaataatactctacagcctgtagcactgcaaagtgatgtgctggggttggcttgtgttggctcgtgagagcctactggtaaaatttttaggaatttaggagttttgcaagctggttgttaaacagagccattattataaattacattgagtaaacttgcaattaagttatagtaaaagcagaagtactaaatattaaaaatgtattacttcccaattatttcactattatctgtgttcttgaggttatctgtgactattacatttgcatagtggaaatattctataatagtgtgctgagagcctcttctatctctgtatttggtggcattagcctgaaatcagtgatcgtgggaatatttacaccaccaaaattggcaaacgctatgaatcagggcctttttttctctggagacccagttgttaagcatctacagcccaccactgcctagagccacaatccctgtcccgtcttgtgacacccctgcatttcctactctggttttagctgtttctttttgcacttacccccatatttcttaattacatgcctttaccactgcatcttgattttcaaatattagacatggcctactggctccctattatggaaaatgaggctctagcttttttccagctctgtctcccttcttactacgcacacatacacactttcctcgcctctgtcttcccagtacagcatagcacaattcttgcttaagatataaatattcaggttttacattattacaatcatgtaaatattgtacataaagcattaagcaatgtgatcacgttagctttctttttttttttttttttttttgagacagggtctcacttggtcatccaggctggaagagagtggcatgatcatgatttattgcagcctaggcctcctgggctcaagcaatcctcccacctcagcctcccaagtagctgggactctaggtgtgtgccactatggctagctaatttttttggtatattttttgtaaaggtggaattttgccatgtttcccaggctggtctcgaactcctgggcttaaacgatccacctgccttggcctcccaaagtgccaagtgggattacaggtgtgagccactgtgcctagcctacattagctttctcagacaacatgttttcttggagttaataattgcatttttaaatttgtttgatgtctctatagaaaactggttttcggccaggtgcggtggctcacgcctgtaatcccagcactttgggaggccaaggcgggtggatcacgaggtcaggagatcgagaccatcctggctaacacggtgaaaccccgtctctactaaaaatacaaaaaattagccgggcaaggtggcgggcgcctgtggtctcagctactcgggaggctgaggcaggagaatggcgtgaaccccggggggcagagcttgcagtgagccgagatcgcgccactgcactccagcctgggagacagcgagactccgtctcaaaaaaaaaaaaaaaaggccgggcgcggtggctcacgcctgtaatcccagcactttgggaggccgaggcgggcggatcacgaggtcaggagatcgagaccatcccggctaaaacggtgaaacctcgtctctactaaaaatacaaaaaattagccgggcgtagtggcgggcgcctgtagtcccagctacttgggaggctgaggcaggagaatggcgtgaacccgggaggcggagcttgcagtgagccgagatcccgccactgcactccagcctgggcgacagagcgagactccgtctcaaaaaaaaaaaaaaaaaaaaaagaaaagaaaagtggttttcaagctttttttttaagcaatggagctcatcagtctctagaaagacttgtctccttcccgagtgcagggctctggccactccttcttctaaataggctcctctctgttctgaataggttccggtgatgttgcctaacctgcccctccagtgtatcgcccgtgggctgctggctagaagctcctgttatctgatggccacctattgactggttcggtgcctttcagatttgcctgggctgggctgggtgccaaacacttaatgcacacagctctgctcagggaacactccaatgcagcttttgcgatcagatggaaggaatgactctgtcagagagtaagtgagctgtggaagcagatgatgcagggcctgtctgcccatgaaaagtctgagctgcaggaggggagctggctaacaatgaccagtagggttcaagaacactcgcttttgagaatcacacctgtgtggaaatcccggctttgctttcagctgcttgaccttgggcaagtagcttaacctctctgggccttaatttcctcatacctaattaacagggttgtttccagagttaaagataacgtgcgtaaccctaataaatctgagtcacatgtgacccgcctctgcttagagtctcattttttaaaaatcatattcagctgggcgcaatggcacacggctttggaaggccaaagcaggcggatcacctgaggtcaggagttcaaaaccagcccagccaacacagggaaaccccatctctactaaaaatataaaaattagctgggcatgatggctgacacgtgtagtcccagctactcaggaggctgagacaggagaatcgcttgaacccgggaggcggaggttgcagtgagccaagatcacaccactacactccagcctgggcgacagagtgagactctgtctcaaaagcaaataaataaaaaaaattaacattaaaatttaaaaactttccttttttttttgtttttttgaagacagagtctcactctgtcgcccagactggagtgcagtggtgtgatatcagctccctgcaaccctcgcctcctaggttcaagtgattctcatggctcagcctcccaagtagctgggattacaggtgcccaccaccatgcctggctaatttttgtatttttagtagagacgggttttctccatgttgtctagactggtctcagactcctgacctcaggtgatccacccgtctcagcctctcaaagtactgggattacaggcatgatccaccgtgcctggcctaaaaaattatattctaacagcccaaaagtaatttaaaatatattccaaacctaactgcatctttcatagaatattgaaaggaagcccatttgtaactgatatcaacgctctccaaatcctttttctctatcctctaattttcccacaacatacaacatcagtgaaattctcctgggtccagcctctgaggcttttttccccctctctttctctgcctcattctgcatcttccataccactaccattttctccagtcctgttttttcctctacccatcctgccatggctctgttgcaaaagatcaaacgatctggaaatgagccgacagagatgcaggcaggaagtggtggggaagaggtcacagcaggacacatactctgaaataactcttcttcatctcactgggaagtgccaggcatgtgcagtagcaagggcttggcagaaattggttctcctcctccttattattctgatgaggaatctgaaggagacagcggtataacctcctagacttccctcttttctgaccacctacccactgttagcagatgggccgtaactggagaaacttccttgcctcctttcctccaaactccccaaaaaagtagcaggaaaaagacctgagagatggaagcatagcttctgcctattccccctcccttctctgccacctttgtagccgctaaacatggaacagctcttccacacccatccacgccccttgttccatccgtttgtggactcaccccctcccaggaagtcatggactgagcacctactgggtaccagacctgtaaggggctggagattcagagacaaggatgacacagactctgtcctcagttgctcacagacaaacagaaacaaactgcaaatcagatctggttgtgatttgtttgtttgtttgtttgtttgttttgagacagagtcttgctctgtcacccagtctggagtgcagcggcacaatcttggctcaccgcaacctccgcctcctgggttcaagcgattctcctgtctcagcctcccgagtagctgggattacaggcgtgtgtcaccatgcctgcttaatttttgtatttttagtagagatggggtttctccacgttggccaggctggtctcaaactcctgacgtcaggtgatctgcccgccttggcctcccaaagtgctgggattacaggtgtgagccaccgcacccggcttggttgtgttataatggagggaagcacagaatgctgtgagagcacagaggaagagatcttcacccactaagggatcagggaagactttctgcaggaggtgtcatctaagctgtacaataataagtgctgtcatatattgagcatttactgatattctcttcactaagtgctttgctaagcatattagctcacataatcttcacaacaatgctaaaaagtagacattgctattctcattttagagaggggaaaccgaggctcagagaagttcattaactttcctaaggccacaactttcactgctaaaaatcagcagagctgtaattcaaacacaggcctgtgggactccgaagactatgctttcaaccacagggcactgtgtaccggtgttcaagatgtacactgcagaaggacgctcattcatatcgtagagagaatggctcgtgtaagagtatataggtggacccagagattcagacctctctgctgactcccagagcagcaggaaagagcctcctcctgatccaaagctgactgtgccctgggggaagcagggagtgtgggccccagggagagtaggtacacccagcatctgagcgtgcgtgaacaaggcagatcgtgggcctgtgtgtgtgccaccagggctgctgcccatcaggctggtcactccagtgggtagtaacagcttaactttaaacacttttacttgatgcaggggcaccttttccttatttgcagaggtgtatatgaacgagcagcagcctgtcccaccatggctgtgtggcctccctgaaccattcagtcttggggaggacacagctgcagagcagtgtggcccagactgacttggcccagcagggcccaaaaacaaaaataaaacacaggtgattcctcaaggaccttccagtccagttgagaggcccagaaaaaaggtgctccattcaaggccaccccagggccatcaaactaatctccttctctctctctctctttctcctctgcagacaggcaggattgaacccaactaccccaaggtctgcggccaccagggcaatgtgctggatatcaaatggaaccccttcatcgacaacatcattgcctcgtgctcggaggacacgtcggtgagcagaggggtgctcccggaggagggtgggctcaggcccctccctgcttcctttggaggcctctcttcctaccctcccctcctccaccctttgcccttcttccctcctctttgtcatctttccagcaagccccacgatgtgggggggatgggagctaggaaagaaccaaggcagcaaatccctgctggattccagagatctgtgttttcagtgtgattgagcttggaggtgttgcttttgtaggtgagaattagaatttaaaaattaagcgtgtgattcagcatttgtctatgctgtctaaagaagggcaagggaaagaatatgaacaaggagggagggagaaaaggaaggaactggatgggcatgaggaaaagagcgcctgttctttgcaggctgggcagggtaaatgtaccatctggtttgtcctctctgagtcgtggtttctaggaaaggagacttagctgagagaagtgtcctgatttttccaaggacccacacaggtgacccaaaatttgaactccatgtgtcccaccattcaatgagaagagagaagaaacaggagaagggagataagtaagagagatcagggaggagacagagagaacagggagagaacagataggagaaatagagataggagggaaagggggaaagagacaatttagagagggggataaagaatccagggtaagtggcttgggcacagtgggttcacgcctgtaatcccagtgctttgggaggccaaggcaggaggatcacttgaggccaggagtttgagacagcctgggcaacacagtgagacccccgtctctacaaaaaattgaattaaaaaaaaaaaaaactaggtgggtgtggtggtgcacacctgtagtcccagctactagggagggtgaggtgggaggatcacttgagcctggaaggtcaaggctgcagtgagctgtgattgtgccactgcactccagcttgggtgacagaatgagccactgtctcaaaaaaaaaaaaaaagagttcgagcatggtggcacatgcctgtaatcccagcacttcgggaggctgaggcaggtggatcatttgaggtcaggagttcgagaccagcttggccaacatggtgaaaccccatctctactaaaaagataaaaattagccaggcgtggtggcgcacccctgtaatcccagctattcggaaggctgaggcaggagaatcacttgaacctggaaggcggaggttgcagtgagctgagatcgtgccactgcagtccatgcactccaggctgggtgacagagcaagactctgcctcaaaaaaaaaaaaaaaaagaatccagggaaagtgaaatttgaaactgtgttctggccactccttcctcagactctaccaactttcaccagtggaggtagggtcagagggcgctggcagtggccttccagagggagggtcccataatgtgttccacactgtccctgagcagcatcagtacaccagcttggaagaaagaggagatttcagagcctcagctgagctggtgaggagggcctggtgttcccagatgaaggaggatcagcctaagcccctggtgttcccaggcaaaggaaaatcccagccttttagtcaggccacaagcatctacctggtgctcactggcagagcctgggtaccggtcagattttcaggaatgttggaatgggaaggaacttcagagctcatgtctccctgtcttcccagactggactgtgagctcctgggagcagagaccacagcctatttggttctgcaccccatgcatccagcacagggcctggtacctaataaatgcttagtaggtgttggatgggatcgatggatgcatggatggatggatggattgtggatggatggatggatggattgttggatggatggattgttggatggatagatggatggatggattgttggatggatggatggatggattgttggatggatggatggatggatggatggattgttgggtgtatgactacattgatggatagagagacgaatgagtaaaattgatgatggatagatgaatgaatgaaagaatggataagtaaatagatgactgtatgacaggtgggtagatggatgaatgaaagataaacacatgaacaagtaaattaatatagtccatctaatcagttatccaaagaaagaaagattcacagtaaatagcctccatcagttcacacgctgggggtgaggtcagctggcacagtacctagtacatgggagagtggtgaggaggtgactggaagggtggagtgcacttgaccagcccatagtccatcacagagggctcctgagagtggcagcagtgaaggcagtgcccttgggagcagagagagcaagagcctatagtgaagatggtccatcaggcttcagcagcccagaaccaaattagggacagtggtcaggggtcaggacataggcaggccagggctgcagaaggaagggcacaggtgctggagctgggggacacagagagttcaccggttgcttcctgggctgggaaagaggcacaggagctggtggaggctggagagcccagtggccagcacaagaggcctggggtcagtgggagagagggcaggtggaggtgctgcccatccttctctcctgggttcagggagcccaagaaggaatgcggtgaccacagctggctccgtccctgcctgctgaggtgctgggagagtggcgggaagggctgaccccagctggtgtcaccagccagcaggtagtagcccctggaactcagggctgctcctctacccactctgggatgggcctttcacatacatttagctcttagagccactccatgagacaggcactgccacccccaaactgagggttggtaggtaggtcacaagccaggaagtagaggagcagggattttacctggcctgctcgctgcaaagcccatgctctgccaagcttcctcatcacagacagccaatgctgtctcccagtggctcatgtcttacccagggacccagctaggataacagatgagcagtgcctgtcttgatgtaggggggacaaattagaccagggctcctggaatcactggccacccaggttcctcctcaggtctcaatttctcctgcctggctcatggtgagaaggatctgaccagtcctagctcggcgtcttatttaacctgatatgtgcctcatgctccaggaccccagcttgtaaacaagacatccatggtttgtgtccaagaaaaacataaggctgcatccccggccacatgagccaagagactctgttcagttttgcacacactgactgacagaccacggtatgccttgcaccaccctggctgctggggtccaaagagggatctggtagacctgggctggaatctcagcttcaccatttaccatctgggtggccaatggagtgttacttggcctctctgagcctcggttttgctcgtctctgaaacagtaagatacctccctttggctgttgtgatgaggatgaaggttagcctatgcccagtagtatgcctgtcccttcatctatgcctgctcatctcactcttgctctggaaacacccctagtagaggcgcagaggggcagggcccaccccacccaccaaaacgtggtgcagaatgaggtcattgcatccaccaaggtcaagcaaagggctatgcacacagagaagagagagagagattagttttgaccaaggtgcagagaggagaagaggtagttagctggactttggagaagcaggacattgacagacagaaaaagggttagagaaggagtcccaggaagagacccagtatatccggtgtgcttggcctggagagaatgcatatacagtgcgcttagaaaagggagagtcatctggtgtgactggagccctggggtggtggtcagtgagaggagcgggcaggaagggcagctgcgaagggcagttggacccaaggagagaaggcttagggttcagggtgagcagcccaactttgcagcgagacttgtgcttctcaagccatctgagcatcagtggaccccaccgagtgtggtgcatgggagacactacacgctccagggaaccaaggggacctgtgtggatggagggggtcacagacagatttatggaggacatggggcctgaactagctggatacaggtagatcagtggagagaagggaagagcggaggggtgtggctggaggagtgaagggaagggacacgggcttggggcacaggaagggaggggctggcctgggctgctgatccagagacaaggagattaagtctggatcagagaggaactaagctctcgctccagctgccaggccagctgccccagaagtacagccctgaaccgcatcttacccgggtgtccacccctccccgccttggagctagggatcttggcagtggaaccaacaggttcctgaggctggatcccaacctctcctggaggacgtgctctgggaccctaagggaggtgccttgcccaaggtcacacagggagcctttgtcctaggaaggtcccctgactcccagtctgcactctcagcccctcaccagtggccctggttctacaagggaggaaactgaggctcagggccatggtgggctgggctgacagttcagattcatcacgctcaacatttacatcacagcgtctgctctcctcagggtccaacctgggtgctgggggaaagcacaggagaggcatcccccgctgcagcctgggagggggtggggcgtaaaggaaatggagtttgcagcttccagggggtggacaggaggtcagcactgctgccagggcccttcccacggcctccctgcctccttcaaagcacctgaggcatcggccaccgaggccctccctccacccattccagctggaatggtcaacttgctgctcaccagacacgacatccagacccaggcttgggaggtcagtcggcaaagctgctgtgtgtgccaggcactgtgctacatacagggctggggacggcgccaggccacaggggcccagagggaagctcttcacagcaggtctggaccagttcccctggtagtgcctgcctgtttcacccccagccctccacttccctctacttgtctcaaaacattcagaggacactggtgggatttcacgagccctgatttccccagctccttccccatatcccccagccctgcaacctccagtgaaatcaatccccgtcccccaggatccgtttcccctccctgagcaggaggaggtcctctggagtctatcctccatcccgccagggatccagcagaacatacccaggcccttccccaggggctttgggcccgagggagggctgggggccataactctccctggcatctggcagaatccagttctttccgctgctgggtgatgtcacctattgttgaaggctatgctttttatagcttctgccgcagctagggagggcggctggcaggcggcagggaagggcgctatcggtttccaagcctcgtgctcccagcccttctcctggggccagcagccgcggagagagagagaggtttctgtcatcttaaggagagggagagagcgatcccaggagagagggaggagggagaagaggcaggcgcctcttgctggtgggccgagctccacatctttcctttgccttttattcaagctcttccatcctgtgtctgctctcctcaccctgtagatgatgcccctccctgaggagctgggggcgggatggacaggatgtcagccctgctggaagccacccaccaccctgcctcctgcacacccccacctcccgagctccggaaccaatacctcttggagctggaagggagtgatgcacttttgtagaaggaaggtagccctgaggggccagtgcgccgagtgggtcttcactaatgatttagcagccacagagaaagcagcagtatggctccctggctaagcagccaggctcaggagtcccttaggcctaggttcaaatcctggctctgccacttccaggctctgcgatctaggactagtttcttttttttcttttttttcttttttttgagagacggaggctcgctctgtcgcccagtctggagtgcagtggcgcgatctccgctcactgcaagcttcacctcccgggttcaggccattctcctgcctcagcctcctgagaagctgggactacaggcgcctgcaaccacgcccggctaatttttttttttttttttttttttttgagacggagtttcgctctgtcgcccaggctggagtgcagtggcgcgatctcgactcactgcaagctccgcctcccgggttcacgccattctcctgcctcagcctcccgtgtagctgggactacaggtgcgcgccaccatgcccggctaatttttgtatttttagtagagacggggtttcatcgtgttagccaggacgatctcaatctcctgacctcgtgatctgcccgcctcggcctcccgaagtgctgggattacaggcgtgagccactgcacccggcctaggactagtttctttacctctgagtaccagttgccctattgtaaaataggaatcatctcgggctctgagaactagatgaatataaaagtgttttgtgtcccctaagaactccatagacattaactgttactttcttttccttaagtgagggcccaagagtttaaataacttgcccaggccgggcacggtagctcacgcctgtaatcccaacactttgggaggctgaggtgggtggatcacctgaggtcagcagcttgagaccagcctggccaacatgataagcggaaggacagatcatgtcctcctcagggggttgggtccagcccagggaagaaggaaaaatcaggtacgggcacgggcaggagtgtggaagagaggaggagggtagtctgcctgattccaattctgagtttgaatcccagctcctcctttcctagctgtgacacctgggcaagttttctcacctctgtgggcctcatttccttatctgtgcaaggacagtctttagtagtcataataataataggtagcacttattctttcatgcatccagcgccacaacgaccacttcatgcatcctctagcaaccccctcccaggactcacagcagtagatgctcaacaatgcttccttctgggtcctcagttcgcccctcctacctccctgggtttggtgggattcgtttcccatattggcaaacagtgagtccagtgctcagaagatgtcagaatcaaggtagatgttgagattctacctcttgtttagatgaatgatgataaactcaatttttagaatgaacagaatgattgacaagaaacggggaggagagagctccaggagcctcctggcccctaagcaaacaccttcagcttttctcttcactgcaggagacatcacagttactgtgctcttggacccaggcaccatctctgtggattggttagatggaaatcttggagccaatgattgtgtactgtatacagctaaattggaggcttctcaagggcagaaaccatatctttttctttttctttttctttttttttttttttttttttttgagacagagtctcactttggcacccaggctggagtgctgtgacacaatcttggctcactgcaacctctgcttcctgagttcaagcgattctcatgcctcagcctcccaagtagctgggactacaggcccatgccaccactcccagctaatttttgtatttttagtagagacggggtttcaccatgttggccaggctggtctcgaactcctggactcaagtgatccacccgcctcgcatcccaaagtgctgggattacaggagtgagccattgtgcccagcccagaaaccatatctttctttttttctttttttttttttttttttgagacggagtcttgctctgtcaccaggctgtcatgcagtggcgcgatctcagctcactgcaacctccgactccctggttcaaatgattctcctgcctcagcttcccgagtagctgggattacaggcacgcgctaccacgcccagttaatttttgtatttttagtaaagacagggtttcaccatgttggccaggctggtcttgatctcctgacctcaagtgaactgcccgcctgggcctcccaaagtgctgggattacaggtgtgagccacctcgcccagcccagaaaccatatcttatactgtcctgttcttccccacgctaccccaaaacagatttgtttgttttttgaagtagctactaaggggttagatatcagatcttctcctagctgcttaggcccatggtgaactccaactcctcctgtgaacttctataccatatatacagacagtgggtactgtctgcttgctgtagctgtgtaataagcagcaggtcccttaaatggagaattctgccccttaggaacagtgtcatcagaggagctaacagccctagccctaagtcactagcagtcatgaccctcaacatgtcagaaagcagagatctaaccagacacctccataatcatgtacgcgttttaaagatgaagtttatgctgcattccataaaatggaaacaaacttcatatcatatgtattgactacacagcgggcaacaaagtgcacatgaaaaatataacttggccaggctcggtggctcatgcctgtaatcccagcactttgcaaggcagaggtgggcagatcacttgagctcaggagttcgagaccaacctgggcaatatggcaaaaaccctttctctacacacacatacacacacacacacacacacacacacacacacacacacacaaatacaaatattagctggtcatggtggtgcgcatctgtagtttcagctacttgggaggctgaggtgggaggatggcttgatcctgggaggtggaggctgcagtgagccaagattgcaccactgcactccagcctgggtgagagagcaagaccgtgtctgaaaaaaaaaaagaaaactataacccaattacatctaaagtttgaccactataaaacttgggtatgatccctaattaatattaggtaagcatccttaagtgttattctttggtcatctgcttggtagtgtatacattttatctttacttagtatttatagcagctctgctgtatgggtataattatccttacaggtatgaagacagatgttcggagaggctaagaaacttggggaaaatctcacagccaataaggtcagagcctgcattctaacagagctgtcagaccacaaagcttcttgcttgttggccagctgctccctctcccacgtgcagggacagttggttttgtagctttattaactgtccttatcagctgccttgcctttgccttgtctgcagtgtctgctgcctccccaacaagactgacagctacttgagactaagagccgttcccccgtatctaatctgtttggcacacagaggggagctgggtatgttctgttgggttgaacatcactgaattaaacaaggctctgacccagggacctgtaaaggggacagtccccagcaaggcaggcttgctggagagagtagttttgccacttctccccaccctttccttccagaaatccggtttggcaaacgctactgagtttcctgttgaattgaagtaacctcccagagcaacctctgagcagatccacagggctcctcccatgccttatccactctgttttcaacaaatccctcgaatactaagggattggaattcctttcccagctactcaggcccactgtgaactccagctcctcctctgagctctgtagcatgtggtgccaactgtttgctatagccatgggtcaagcagagcccgtctccttctcccagtaatgtattcaatgtcaaagcagaaaagtttggaagattaactaatactatctaaatgtgcagatgaaggccaggtacagtggatctcacttgaggtcaggagttcgagaccagcctggccaacatggcgaaaccttatctctactaaaaatacaaaaattagctgggcgtggtggtgggcgcctataatcccagttactcgggaggctgaggcaagaaaatcccttgaacccaggggatggaggtttcagtaagctgagatcacatcacttcaccctagcctgggcaaaaggtgaaactctatctcaaaaaaaaaaaaaaaaaagaaagtaaatgtgcagatgagaaaaccaggacccagggagggaagtggctggtatcaaatggggataaagcaaggcacctctctccctctctgtgggatatttattcatctgagtccctcaagccctgcctgagaccctacatccaacagttcttggtgaaaacagctctcttggtttccatctgtagcccttcattccatgagacttgaatccagttaaggggctggtgcctgggcatagacaccagttaccctgaccccccatccctgggcttagcccctaggctcctaggcagagctgtcacctcagcatgtcagctcatgtatctagaaggcttcacacttccaagagctctgcacccagtttacttgaacccacacacctctaacaggtacagtctctattttctggatgaggagcctgagcctcaagacaggttaactggcttgttcacagtcactcagctagtacgtgagactggaacctgggctggggctcactccacagccccccatgtgactctaccttaccctggcataggtgtaacccagagatgcctcagttactgggttgctcaggaattagggtgtcctgggaaagagttttcttctgagactctgggcccaagcagggcttcttcaagcctcagtgacgagatatgacacacatgacctctggcctcctctccaccagccagcctgctccacacgagccaggctgacccccgtgcaggttccctacctgctggcgcccgaccccacacacactgggcatttttctgcctcctcaccgcttccaacatcccaacttgtctttttaaacttagttcaacaccctctcttccaacactgctcctcccaggccctcccaccctcgtccccctaacagctgggttcaagctttccaacagctctgtgcccccacaggctctccgtctgcatgcaccgcttagtgctactcaagagcaggcatgggcaagttcaacaccacaccccactggctcataggaggccctcgggaggtgttagtggagttaatgaggctcaacttttggcttcaaagatctttcttgatggccaggggcaactattctacctcagtcaatgcttatgcaccaagatacagtatgagacatccctagacagaatcctctgcccccaaatatctcttccctttgagtctgaaagctttagagcttcctactcaagtgcagacaagggtagccggtagacatgagaaaagatgcctggtatttttttttctttttttttagagacagggtctcactctgtcacccacactaaagtgtagtggtgtgatcatagctcactgcagcctcgtcttcctgggctcaagcgatcttcccctgccttagccttcccagtacctgggactacaggagcatgccaccacatccagctaattttttccttttttgtaaagatgggggtctcactgtgttgcccaggttggtcttgaactcctgggctcaagcaatcctcccacctaggcttcttttttttgagacagagactcactctgtcgcccaggctggagtgcagtggcacaatctcggctcactgcaagctccacctcccaggttccagcgatagtcctgcctcagcctcctgagtagctgggattacaagcgcgcgccaccacgcccagctgccgcctaggcttcttaaagtgctaggattacagacgtgagctaccacgcctgtcctcggtatttctaagaatggaaggaacacaaatccaaacaacaggtggcatttttgacctatcagatgggtaaaaatccagttttttaaaggtatagttttagaggcataatgaagcagtctcagactctgtgggttaaaaactaggacagtttttggggacaattttacagtaactataaaaaatatgaaacacttctagccattttcctacaagaatatccacaccgctgcacaaacttggattacgagcatgtttgtcatagaataaattgtaatcatggaaaaaagtgaacagaacttagatgtcaattaatagaggtcgattatattcatcatggaacggtcatacaacagatgcctctctggccacttaaaaagataaggtagatattcatggagtggtgtggaaagatgcccaggatctgttatgtgagaaaagcaagttgaaaaagaacatgtgtaatagtatcccttctgggtaaaaagaaagaagtgtgtgtgtctatatgtctgtgtctgcgataggtgggtgtctagcccaagcattagtctcccagcttcagggtcacctttctacagtacatttggggacagaaggaatgtggtgactactgagttatgtactcgccagcttgttccccctgcaccctctcagtcacttccagaccagtcttcatccctgaacgccctggtgcaggggttgttgaggaaagagcattggggtattctgggccccctatacatcactccctcccccaattccccccctcccaccatctcacaggactgtatgggagtcttggactttactagagggttggagccaccaaaggggatgacaatggggatgggaaaatatttcaaactctccccaaattataaagtttttcgcaagtgggcttttgaaatggatttactgaaactgagaatggtgcacccaagggtgaccccaaacccttgacagaacttgcctttcttaccttgaaacctcccagtcaacagccacaggagctggctctgtggggggaacacacatgagggaaatgcttattcttatagtatgaggaggaggcaccaagaaggaaaatttgtccaaggaattccctgaggggcaccccagttcctagccttgctcccaggacttctggtctgcctttggctttctttttttcttctttttttttttttttttttttgagatggagtcttgctctgtcacccaggctggagtgcagtgacgtgatctcggctcactgcaagctccgcctcccaggctcacaccattctcctgcctcagcagcccaagtggctgggactacaggtgcctgccactacgcctggctaatttttttgtatttttttagtagagatgggtttctccgtgttagccaggatggtctcgatctcctgacctcgtgatccgcccacctcggcctcccaaagtgctgggattacaggcgtgagccaccgtgcctggccctgcctttggctttcttccttttttttttattttctgagacagagtctcgctctgttgcccaggatagagtgcagtggtacattcatagctcactgcagccttgaactcctgggcttaagggatcctcccacctcagcctcctgaatagttgggactacaggtgcatgccacaacatctggctaattttttcaattttttgtagaggcggagtctcactatgttacccagtctggtcttgagctcctgggctcacgtgatcctcctgccttggcttcccaaaatgctaggattgcaggcatgagccacctcacctggacttgactttctttaacatgctttctgcatttattcatagcctttggaattataatcaattgactagtattacatattgatataatgtattacattgttcctttaatgttgatcacttacactgcttctacattttccatataaatgatgttgcagtgaacatcttcatgcatggagattttttgcttatattgtattttaagagtgaagttactgggtcaaagagtataatataaacgtctttatggctcctactaaagattgccaaattgcttccaaaagagttactctgatttataatactaccaacatccattcaatctataacttctagtattaccttgccaacactggctctttttatttttttttggttggctattttagcagattataaatggtatctcaaagctgtttttcctgtttttctccttactagcaagggtggagttcagattttcgaaaagatttttttttcgtgtttttttttttttttttttttagacagagtcttgctgtgttgcccaggcaggagtgcagtggatctcagcacactgtaacctccgcgcctggcctcaagcgatcctcccatctcagcctcccgagtagctgggactataagcgtgcgccactacacccggctaatttttgtttctttggtagaggcacggtctcgctgtgttgctcatgctgaaagattctttttctttttttgtttttttaaagtgtcctaaattatagtcacatgtgctctttccaaccagttagactgtaatgaataatattaatgataataataacaattataattccttaggcctttagagcactttgcagtttataaactgttataccattgtgtcttttcattctaccagtaggtgaaacagggcagggatgttccccccacctaccacctaccttattgattaaatagttgaagctatgcagaggaggtttgctttgagtgacagaagcccaccagggctgatgtaaataattaagggggtgattccaagactgcagagaaacagctcagtctctccctgtctggggccacgtggtctcctctctgcttctctctgcatgtcccatcctcctctctgcagatcatctttttctgcttctttatcagtatccacaagactgaaaatagcagctctatccaggctctgcccatcctttcagctcaggccccaacatctgatcagtctctgccttcaagtccaccatctctcaggagagacctggggcccctcagcctcccagatgcagttccccctgcccaggggtccatcctgggtgggggacacagtgggggataaggccctgcagtccaaacagccaaagtggggctgagcagagtagcaggaaggcagagtctcctagaaggatgtggcatgtgaagcaaggataggctttttaacacaacatttgctaaaaggggctcatgcatgttcttcttatccgggctaggccacagcagtagcaacatgccagtaataacagttcttaggtctgcagagacttcccagagaaaacctcccacaggcagagagatggtctccttcctctccagccacaccctgagacctcccagcaggcctcagtcgagctttgcccatcgcctcaagccaggaggtggctcatcaggcagatctcagaaagcctggtgtccgaggaaaggggcacctctcatcaagggacttcttggccgtgtccacccagcctggaccctcatctccctctgcaggtgcggatctgggagatccccgagggcgggctgaagcggaacatgacggaggcgctcctggagctgcacgggcacagccggcgtgtggggctggtcgagtggcaccccaccaccaacaacatcctgttcagcgctggctacgactacaaggtatgcagtgggcaggcagctgggtggagagggattggggaagagaaaggggccttttgggtacccgtaggaagcactgttgcttcctaagcaaccaatatggcctcatctgttcatttgcttattcattcattcattcattcgctacacgcaactgagcaactcctgtgcaccctgtcattcctggggtccacagaggccggaggcatcttttctgccttctctggtggttgattggaggagaatgccccttccatgcccacaccctttgcctggccacttcttaaccaagaggtggcaaaaggggtaaccaaagctgctggagggcaaaaagtggagcctcagccccgagccccaggcatatcctcaaaaaaaggtgggctgaccacatgggacctgacaaggaacatgtatccttcttgctcttccataaactgagcccaggctggtgctgggatctgaccaaggatattgatggatttgtgtgccagggatgtatcagcctttccatatagaactcaatgaccccctcctgcaccccagcacaccccaggccctgcatggggcgcttctcccagggcagtcaagtgtgcactggggacaaacaccccaggaccctagcagccactgaccctgcctcccatgcatctgccctcgcaggtcctcatctggaacctggatgtgggtgagccggtgaagatgattgactgccacacggatgtgatcctctgcatgtccttcaacacggacggcagcctgctcaccaccacgtgcaaggacaagaagctgcgtgtgattgagccccgctctggccgtgttctgcaggtggaaccctacattttttgagattgaaggggaaggtattgagggctggggctcagctttcagcaggcctggaagaaaaaggctgtgccagcccccttctccagtgcatctcactgcacctctgttgaacaacctttctctctcctgggcccttctcagctcataggaaccctgccttgttctgggtggggagggacctcataccctttcctgtccccactgcaccccctacctccagacaggattcttctggcttgctctgggggctgaactggtgacacccttcagtgcatacatccccaggtgttacccaggtccaccacaggcacaggaggaggagacactggactcactgcccagccacttgataggatgagcctgagggaaatggctagggtgccaaggctgatggtgaacttagctccacttttggtctttgaatctcctgggtcttgggtttgaggaaggggttaagtgccatttggaagtaagaaattaccattttttgagcacctgctgtgtgctggtcatggggagagatggaatggaaaatatggatgatatctgaggtttgccttctacacaagaagggattaatgcttgatctgggtgtgtttaccttggaatagtccaatattacaagaccagaaagttttctagtactataggttgagcatcccaaatccaaaaatccaaaatccaaaagactccaaatccaaaactttttgagcactgacataacacccaaaggaaatgctcattggaacatttcagattttggatttggggatgtgggaagctcaactagtaggtataatgtgaatattctgacatcggaaacaatccaaaatctgaaacacttctgggcccaagcacttcagataagggctactcaacctgtaccactacaaataagaataatgagagttgcttagcatgattagtgttaactgacatctgctaagagctcactgtgtggcctgcactgtgcccggggctctgcacatcatctcatttaatcctcaggacaaccctctcagctgggtgctgttactcctctcatgtgatacgtgagaacacttaaccttagcgaagttgggagactcgaatctcacagttccaggaggagctaggattcaaacccagagcccatgccaagcagaaagaatgtttatgaacagagaacccccacctccaattcccaaatggggccatgagcccagggaaggtgaaggtcttctcttgggctacacttttttggtggagctagaactagagttcagagtgtgtgacgccagcctgaatatgtgcactgccccattggcctcttttctgacttgctgccaacttacctgatgccgaggactgttgtgtgttaggaggaaatcaagtgtcacgagccagtgggcaggaaaggaggcccaagacagctcagttaaggaggcactccctgatgaggcaagctgtgaagcagtgatgggcatgagtctcttgtcctcctgagcctcagtttcctcaccctcaaaatggggataatgatttcttccgatagatattgttatggggatgaaaagcaatgcccctggtgagagctcctgaagtggtgtagcccccaactggacttggtggacgttggctcccctctcgctccctgttccccacattctctgggaaatggcagagaaggcatctgtggagccattgctgcacagtgcttagaacagtgtcctatggctgctgtaacaaatgcccacaaactaggtggctgaaaacaacagaaatgtattctctcaccattccagaggccagatgtcccacatcaaggtgtcagcaggactgtactccctacagatgctctaggagaaaacccattccttgcctcttctgggggttgccggctcccgtggctggtggccacatcactccagtctctgcctccagggtcacacaccttctcccctgtgtgtctctgtaatcttacctctctcccacaaggacactcatgatggcatccaggatccacctggataatccagggtaatctcatctccaaatccttagcttaaccacatctgcaaggacccttttccaaataaggaaataattgcaggggccagggctgaggacatgggtgtatcttttcgggaccaccattcatgccactgcagaacccacatgttggggaccctggctcaccacctccctctgttcctactaggaggccaactgcaaaaaccacagagtgaaccgggtggtgttcctggggaacatgaagcggctcctcacgacaggggtctccaggtggaacacaagacagattgccctctgggaccaggtcagccacggggaggcctgctgggtttgggctaaaggaagcatcgttgcctcggaggtcacttcctcagaaagtcaggagcctgggcccgcacaccagcttctcatagcattcccagtggagaaatcagacagagacccccagaggccgagcttgggtacagaggcttcaaggaacaatgtcggccacacctgcaagatgttcaccctctttttccagagtgggggctgagctccagagagattgagagacttacctggggacacatagcaagtagcaggtttggggacaatgagaacaagtcccttgcctcctgtttgtaagaccctttccactgcccctggctgcttttcgtgacaagaaagtcagtcttgccaccacccataggacgggctttttaacatctaggggaggtcttaacataaagtagttgccatcctaagaggccttcctgggatttggggaggggtatgccatcctgcctgcagagaggctgagaccagctcttctccctcaggaggacctctccatgcccctgatcgaagaggaaattgatgggctctctggcctcctgttccccttctatgatgctgacacccacatgctctacctggctggaaaggtagtaggaggtgggggagggcccggggcagcctgtgggagagccctaccctcaatgcacccctgcacctgccccaccccctggagagtagccagcctaaccttccaagttcctgggcctcacctttcccatccacacctgccctcaagtctgacacccattcttactcaagtgtctgctaccaagaattccttcaaaggtgagctggagcgggcttttacattggaataaagatcagagcctgcagtgtagtcagtgatgaatgatggaatttgagatacccgccaggagatccttggtgaatacagccttgtttgtcagaaaggctgtctacacacacacactcacatcagcccatccacctccacctctccacccgcagtgagtcccctgtggtgcacccactaggagcctagaagccaggtttccttggtttttttaactgcccatgaggcacaggggagagctgtcttcagctggctcctgggaccaggccctgctctgccctccctacctgccaccttcctcaactccatctctcctgaccccagggtgatggaaacatccggtactacgagatcagcactgagaagccctacctgagttacctcatggagttccgctccccagccccgcagaaaggcctaggtaagtggccccgaggctgccacagctggtgtgctcatggcacgggaggacatctggcccatgggtcaccccctcccttaagtggaaaatcagactcagaaggccatagcacatgggcaagttggaacagaacctgcaagagctggccctgctgcagctgtcactgcccactggaccggcgctgtcaccccactgtgctcacatccaccatcagcggcagcttgccagcatgtgctctgcgtctgcactcctgatcgcagatggggagcctgaagcccacagtggctatgatgatggtgggaagtggtcccgtaactagaggtcagagtggggtctaggcacaagtcccttcctgagcctctaggaagccgtgactcccagatcccagcagcagctctgtctgcctgatagggcaggaagaagttccaggtgttcccgtgactgcagccccaagctccctaggctctcaggcagaaacccagagagggctctgggattgacagggtgtagtgagtgagaccccacattctcccaccactaaaagtcttacaaccaattttccttcctttcaactaacctggtaatgcatatgattcagcaattctatatttcgggtccaaatcacccaatgaaacacctattttcagggacctcccgttcccacctctgcgggtgatcctctttggagcttgagtctagcttgctttccctgtgggtctggtattatggacagggcctgagggccagcttcaggaacatcggggctgaaagggcctgagagcccactccagtgaccaacagcaaaatggaaaccaaaagatgtccgaagtcctaatcaccattccatcaactttactcttccccaactctgtcatccccacctccttcactgtcactcctgcatcaaatagtataaaaatcagcctggactttggagtcagacctgggtttacattctggctcagctgtgcacttaatccctctaagtctcagtttcctcatctgtaaaatgtggataatcaaaccttccttgaatggctaatgtaaggcttagagaccacatgtgcaaggcacctggcagagcacttgactcctcctgctccttcacatagttgttcaacaaacagttattgacctccagctgtgtaccagaccctgcgcgaagtccagtggcaaataaaacagaacatggccttactctcatggagatcacattccactgagcaggagacaggcaataaacaaataagaaaaatattggatgggaatgagttctaggcagagagtcaaatggtgtgctagaacagaaagtgactgggggctacttcaccccggtggtcagggaaggcctctctgtgatgatggtattttaagttgagctctgaaagatgggaaggagaaagagcagtcccagcagggggaatggttagtgcaaagcctctgtggccagaatgagcctggcatgttctaggagcagaagggaggtcagtgtggctgagcgtggtgtagactctgtgatgtagcaggagatggggggaggatgttaggagaccatcggagaggggggcaggggctaaatccatgggatgcattagcctgggaaaggagtttgcatttgataaggaaatcattatggggagggttctttttcttgagtgggacatgagacaacatgatgggatccgaaatgttagttaagattgctctggcagccaggtgtggtggctcaagcctgtaatcctagcagtttgggaggccgaggcaggtggatcacctgaggtcaggagttcgagaccagtctggccaatatggtgaaaccctgtctctaaaccctgtcaccaaaaatacaaaaagtacctgggtgtggtgatacacccctgtaatcccagctacttgggaggctaaggcaggagaatcgcttgaacccgggaggcagaggttgcggtgagctaagatcacaccactgcactccaacctgggcaacagagccagactctgtcaaaaaaaaaaaaaaagatttctctggcttcagtagagagaatggatttgggaggggcaggaggaagacagggaaaccagttaggaagaagttgcagacttttaggcaagagagaataataggtggggagaaggaagacggggagaacagtgtgaatccagatgtttagaaagtaatgtcagcaggacttgctaaggtatcggatatggaggggtggagaggaaagaagcaggaagggctcagaatgactcacttcatcctcatcctcatcctcctcacctgtgaccactattgagcatttgctgtgatgtaggcacttcttgtagactcagaaaagttaagcaactcacctgaggcaggtcttatctgctaagtagcagaagaagaactcagaccgaatctgctggctcttaatcccatttgggaaaccatttcaccccttacctccagctcctggaattcctttatgtggaagagcaggcttccagcccagaggaggagaggcagagccttaactcatattcacaatacagggaaagaaatgaatgtggtctgtgctcgtcacggtgccaggcagttaatgagtatcttggaacatattctgctgatcacctcaggtagggccattgttgtcctcctcgaaccagccaaggaactggaagctcagagagttgtaacttgccaaaggactcctagatggaaagggggcagagtgaggactcaaaccccgttggtccacccctagatagagctgtgctcctagcaccaccacactgcccctcatccccatgatagacgttcagcagaggcagctgttagggacatgtggtaagtgaacccacacaggaaacatgggcacacattgttggttctaggagacatagaacagaacagcaatcttaggctgcgtccagacctctagggtgtatggggaatggcctctccctcctttctctctcaggactggagacacaggaggcttagggatgactgttcatttcagagggtaatgggctctgtggccctgcccctgctgtgctctgtgaccttgggtaaccccttgccctctgaccctctctggaccctcatctagaaaaggagtgggctagattcaaatgtttctgcagtttcttccaattctaaagggtccaattctaaagcacgcactgtggtgaggcaggtctggcccaaggagcttgagaagtgaccacccagagacagagactgattgaaggcgccccggtctaccccctgccctctgcatgggccgttgcctccaaacctaagtacattcctcagcctttcccctggcccagaacatcatggggtgatgtcactgagacgcagtttctgggaccccatggagccacatgtgtgcctgttacaggggtcatgcccaagcacgggctggatgtgtcagcctgcgaggtgttccgcttctacaagctggtgactctcaagggcctgatcgagcccatctccatgatcgtgccccggagggtaagtggggctgggctgggctccaggaggggggcctgcatcgcctcttagcctgctcaccactgaccatgaccctggagaaacccaggtgagagatgtgctgtgaactggggtcttcaaacctaatttggggtgaggggcattctcagatggggacagttgggtttgctcatgagtgcagtcaggtagttccaggagggagacacagtgcaaaggcatagaggcaggagagcaggtagagtgactggagatcagtaagaagagtctgactgaagagtaggggctttcccagcagccccccatgtgtcctctcttctgctcctcccactgtagtcagattcctaccaggaagacatttacccaatgacaccaggcacggagccagcactgaccccggatgaatggctgggaggcatcaaccgaggtaccacagcggggggctccacagagcacaggcggctgcagcctttgccttcagcgcagctcaccccagttctccttgtctgtccccctgtttgaacttccctcccacccagcctgctggaccatcacctgacagtccatgggatcgtcagtgagagcgtttcccttgccttctttagatcccgtgctgatgtctttgaaagaaggctataagaagtcctcaaaaatggtatttaaggctcccatcaaagaaaagaagagtgttgtggtcaacggaatagatttattagaaaatgtcccacccaggacagagaatgaggtaaggaatgtaagttattacctccacaggccctggaagagcaagacctttacatttcaattatgggcttcaggcctttaagccagttccattctgagacatttttctttctgtgacaaatgccataagtagcctgatattggcttctgatgcttctgaccccaataaatagaagctgggatgtctggagatatcggttccccacaccacccccacgcctcaaattcactaacccacagttatgcatctcctcatgaactcatttcagaacgttgctgtcatttggagttccaggagttataaattcctgactaacaggggcaagcccggcctcgtgtatcacagccctgcctccctcgctggcgttgcagcagtgctggagtctgacacttccagtctttgtggaagagactgggtgtttatgaaggtgctctctgtaccacttggaatgggagcaagctcttttggggcagctcggctgggccttgtccatgtcccccagcggtatttcgttccagcccacacccccattccctgatgccaacatggtttagctcagctgggattcacaggatgcctactgtgtgccagacataaggcctgatacaactgaaatggagatggctgcatgaccccacctgcatttgaatcctggctctgccatttcctggctgtgactgagcaagtctactgacctttataagtccatttccttgtggtaaaatagggatatggaaagctgtgagcattaaagagataattcataagtgtctagcactcttcctggctcatattaagtgctcagagaaaaaggtcacctgtattagctacctactgctgtgtaacaaattaccctagaacttaatggcctaaacccacaaatgcttattagctcacagtttctttgcatgcccgtggctgaaggtctctcatgagggtacagttacactgtccactggggctggaatcacatctgaaggctcaacttccaagttcactcatgtggttgctgctaggactcatgtcctcaggggctattggagtgagggcctcagtttctccttgggctgttggccagagcttccctcaggtccctgccacgtggactcctccataaggcagctcacaacagggtatgtgagcagaagagcaagagagggcacccaagatggaagctacagtctttctgtcacctaatcttggaaatggtatcccaccacttctgccctattctgttcatttgaagcaagctattagggccagcccatgcttgaggagaggggataaaatgggagccatcttaaactagacagtctataccaccaacttatgctatcactattttttgttttgagacagagtctcactctgttgcccagcctggagctcagtggcacaatctcagctcactgcaacctatgcaggttcaagcgattgtcctgccctagcctcccaagtagctgggattacaggtgtgcaccaccacacccagctaatttttgtatttttggtagagacagggtttcaccatgtttgccaggctggtcttgaactcctgaccttaggtgatccacctgcctcggcctcccaaagtgctgggattacagatgtgagccaccacacctggcccactaatcactattattaataaaaataagacccttcttgacctctgggacctcacagtcttaagggggagattggcaggtaacttgataattgccataaaatatgcttgtatgccattgtagagggatattcagggctagatgaaatgatgtgataaatgggatttgctttaaaataacccctgaggaaagtggtgcagtgtaggtgggtggcagtagaggcgaagtaagaatggtcatacgggctgggcgccgtagctcatgcctgtaatcccagcacgttgagaggccaaggcgggtggatcacctgaggtcaggagtttgagaccagcctggtcaacatggtgaaaccctgtctctactaaaaatacaaaaattagccaggcgtggtggtgcgcgcctgtaatcccagctgctcaagtggctgaggcaggagaatcacttgaacccaggaggcagagactaaagctgagtgatgggtacttgggggttcatggtgctatactttctattaatatagatatataacatttttcatttaaaaaatttttaagtgttttcttgtatttatttatttatgttttagagacagagtcctgccctgtctcccagactgcagtgctgtggcacgatcatagctcactataacctcaatctccgaggctcaagcaataatcccaccttagacttctgagtagctggaactagcggcgtgtaccaccatacccaactaatttgtttttaaacatttttgtagagacagggtcttactatattgcacaggctggtcttaaactcctgggctcaaacagtcctcccactttcgcctcccaatgtgctgggattacagtcatgagacactgcgcccagctattttcttgtttttaaaagaactctactctttgaagatagagacacaggggtcattgtgatagcccaggagggcaataacaagggcctgagctcagttctggcactgggtctggagaaggcagggttgaatagtagttaaatcaagcaatatttcgctgtagacttgcctatggaatcagaattgagaacctggaggaaaagcttaaagggtctcagagcagacaaaacagatgccacaatctacaccaaagttgtgcatcttcctcgctgggaagaagctttctcaaagcctgctgactctgcctttatccacagttttaatcatcgtagcagttcggaagcagccagttagaaagtggggctgtcaaaggtggacgcattgatctaagtgtgaggaaacaactgacagcttgatgcgagggaaaagtcctacgattgtacaactcaggaactttactaaaaatcgctgaattgtaagcttaaaatgagtgacttttatggtgtgtgaattacacctcactaaagcggtttttttgacaaaagtggaccaaaaaacaatgcaaagaaattttgagaacttggaagacgcaagagtgtgtagagtcatttagtgcaaaggcaaatagcacgtcatccctctcaacagatgtaactgggactggtggtttgttagttaacaaaaaatatttttttaagttatatttttttaagttagttaaaggaggcaatcatggctgggcacggtggctcacgcctataatcccagcactttgggaggctgaggcgggaggattgcctgaggttaagagttcaagaccagcctgaccaacatggtgaaaccctgtctctactaaaaatacaaaattagccaggtgtggtggcgcacgcctgtaatcccagctactcgggaggctgaggcaggagaatcacttgaacccaggaggcagaggttgcagtgagcggatattgcaccattgcactccagcctgggcaacaagagtgaaactccgtctcaaaaaaacaaaaacaaaaggagagaatcataaaaatgatacatacattcttttttttttttttttttttttttagacagagtcttgctctgtcacccaggctggggtacaatggcacaatcttgactcactgcaacctccacctcccgggttcaagcaattctcctgccttagcctcccaagtagctgggactacaggtacccaccaccatgcctggttaatttttgcatttttagtagagacagggtttcaccatgttggccaggctggtcttgaactcctgacctcaggtgatccacctgcctcagcctcccaaagtgttgggcttacaggtgtgagccacggcgcccagccaatagatacatttggtttctttgttgttgttgttttgttttgttttgttttgagatggagtctcactttgtctcccaggctggagtgcagtggcatgatctcggctcactgcaacctccacctcccgggttcaagcaattctttgcttcagcctcccgagtagctgggattacaggcacctgccaccacacctggctaatttttatatttttagtagagatggggtttcaccatcttggccagactgatcttgaactcctgacctcgtgatccacccaccttggcctcctaaagtactggattacaggcgtgagccaccgtgcccggccgataccttctttaaaccatttatttttgttttaaacataaaacatgcgaggtgtagtggcacccctctagtcccagctactcaggaggctcaggtgggaagatcgcttgagcccaggagtttgagtccagcctgggcaacatggcaagactctatccctaaaaaataaaagtaggccggggtggtggctcacacctgcaatcccagcaccttgggaggctgagggtggatcacttgaggccaggagttcaagaccagcctggccaacatggtgaaaccccgtctctactaaaaatacaaaaattagccgggcgtgatggcacacacctgtaatcccagctactccagaggctgaagcagaagaataccttgaacccgggaagcggaggttgcagtgagccaagatcgcgccactgcactccagtctgggtgacagagcaagactctgtctcaaaaacaaacaaataaataaataataaaaataaaacatatacattcatttagcatattttgatgcaggaccaggaccttttcttcaaggaggccctccctggttggaatctgccatgtctttcacacaaatcacaccttaactcccatttccagtttccatttcttttaggtagaaaaataatttaaagttcatctgaaagcaaagtcctagtttttacaatgttttctctcatctttttttgagacattgaggtataatttgcctatggtaaaattcatcctctgtagtgtgtcggtttaagagttttgacaaacacacacagtcatgcagccaccatcagccaagatatagaatattctccagtcttttagggctagatcttccacacccaattcggccacagtttttttagcatcatctttatcaagattttctaaagcatttaattaagtttttatagaaacaacaactctctttttgtgctcatttcatcaatttatattatatttcattaaattatgcaattacaataacaaatgtaattcacaccagaaagtttgagaccaaacacaattgactgtgggtaacattcaactcaggtgtgcaggagcctcaaggagcctgctgccttccagggctcggcgttttgtggacatctgtcaatatgctttacaggagaaatggaggcgggttaagctagagagtcattggggtgaagatctgccaggatagctgtacatgaatccctgaccagtgcaaactttggtattcttgtcatagttcctcatcagtagggaaaaagctagattccattctgtatcctgagcctccttaagaagagaaggatacaaagcattttagaaagttctaaattatcagcacaagccgggcatggtagcttacacctgtaatcccagcactttgggaggctgaggtgggtggatctcttgaggtcaggagttcgagaccagcctggccaacatggtgaaacccagtctctactaaaaatacaaaaattatccaggcatggtggcacatgcctgtaatcccagctactcgggaggctgaggcaggagaattgtttgaacccaggagacagaggttgcagtgagccgaaatcatgccaccgcactacagcctgggcgacaaagcgagactttgtctcaaaaataaataaatacataaattagcaataataatgtaataatatatgtaatacatgtaataatacatctattatgtattattatacatctattattatgtattattatagatgtaataatacatctattaatacaatggtaaagaaaagcattaagttaggacccaaaaagggacaagcttgggatatttggaaaactggactgtttggtcactcctttttcagtgatcctgaatcaattaatgacgcaggttttgtttcctacctcacaagggaaagtaagagccatgggctgagctagagatgggagaggtgcaataaatgcacctggggagaataaatgtatcaagcagtgggaggcctgggggaatgtgagggcacgggcggcaggcagctggagactcacctgggaaatccttgtctcacctgctctctcctgggccctccttggccccctctcttcctccaccccagctccttcgaatgttcttccggcagcaggatgagattcgacggttgaaagaggagctggcccagaaggacatccgcattcggcagctccagctggaactgaaaaacttgcgcaacagccccaagaactgttagctccccagctgggctgttttctaagccgatctctccgtcgtttctactcatcccttaacttctcccttaccagtgaccccagagacagagccaggacaggagtgggggccagcctgaggacccccgcctaccacctcgagaactggaagccaacctctaacctcctgacctcatgctaataaaagtccccagcttctggagaccccctgccggcagcccctttccctgccaccccaggagccaggcttcccctcagctgggtgaagactacagactccctggggttggcaggggctccatctcagtggaccaggaagcaagaggggaagcgggatcccagctagacttagaacttggacttttcccctgtgaagggggctgccaggacatctcagcactcccgcctggagctctcagcatcactgaaggtaccacagtgtaagtgctggactgcaggctgcagtgatccctctttcgtcccaccccctcttccctcagcagccccggaagcctgcctcacccgacgaggacagcgagcggcccggctcctttctgtctcttcccttcccaccctcttgtcttcagggaattcagaggattgctctccaaggccataatgaccccttgccttccccatgattctctacaaagctcttgcacacccttttcccattcaatttgtgagccaggcagggtagggattagtgtccccctttgacaaatgacagaactgagggttgcaatggggaaatgacttataaagtcacccagcaggtcaacaatgggcccacgaccaagaccctgggtgttcagaccccaaggccagggcctttcccgctgcatcaagatgccaatccctttgtgggcttcaccagtgcccaagtctctatggagaatgagaactggaagccactgctaccgtctacccagcaccagtagtgccgatgtgccacactgcccagttgaggcccctcacgctctgtgcccctagatccttcaggtccccaccctcagctgtcaccaccaccctccccaggggactccatctgagatgaggcctcgtcctcctggaagctgaggctgagaagggtggagcttggccctggggaaggcagaccagggtctgatggcttctagggatgctctgcgtgtgtctcagcaccgctatctcagccactttcagccttatgcacgtagaatgaccacagccactcgcatccgtatagcactttaaagtttctgcagtcctttgacacataggatctcatggagcctcacgtctactcccttctgcagatgaggaaaccgagagaagtggcccaaggtcacgcaactctgagatgccacatttcatttgatcttgtacacattttcttttattccttcttttttcctcctttcatttcccactacgcacaaagagtttataaacactgttctcagaagagtcacagtttggggtgagatctggaaatcaagaaatgggtgtccactcttttctttcattagctaggatctactagatgcattatactccatacctgcttttcccatggccgccctacggaaaatcccatccacagaggccagggctacccaagcccctccaggtgagctgggcctttcctttatgaacctccatcctcccagccagctacagtagggcctcctcaccccgtaccccacagctagacagtgtcagcactcatctcctcctcccacatttctggagcttttttttttccttccccattgacctttgtggtcttctgtgattatttatgctgcctcccaaggatagaattgaaataaaatgttttcaacttatcaaacctgggcatagccatctcatttaaccccagtggttcctgttcttggtcaccatggtaccttgatggtcagctccccacccacagctcctttgcctttctggaatgacaacccacgtctgtacctacagatataatttcacaccttcatttatctcagcactattgacatttggggcgaataattctttgctgtgggggctgccctgtacattgtaagatatttagcagtatccctggctccaccaatcagatgccatagcaaccctcatccaattgggacaaccaaaaatgtccccagatattgcccaatgtcccctggggtgtcagaatcacctcccggttaagaaccactgttctaccgctattcaatagatgctgccccgtgttggggtctgggtgagaccaacgctctacattggaacggtgccttgaagtttatcaggcaggattccacacacttgactcatttgatcttcatagcagctctaattggtaggtccgattattcctgttttcaagaaaagcagtcaggcccagagtggtgacatgttcaaggtcactcagccagtgtagtgggggaaatacacagggactgggtcttatgagccagagccagagaaggtctgtgttcccagtccccagccagactcagagctgggcagagtctgttctgggagcgtggccggggcccattctgagaccagggatgctagatatcctcagtctctcagtagtccaaggttgtcttaaataagagttgtcaggctgcaaagtgaacaggcacccggcagtgtgtacaccacaggaaactcagaagagccagaagaaagcagtgtgggccttagaaaaggggtgaggaggaaaggataaagggctgcagaggaacagcgggcaggacaccgggaaggcgtggtccaggcctggccctaccctcgactagttgtgcaacattgagtaaggctttttttctccctgggccccattttctccatctataaaatgaggggatgggacaatttctagggtcccttcctggtgtgtcatcctaggtttcgttacactagcagttgagaggatgggacaaatccccaagaccacccattgtctagcacgagtgattaaaaaaaagaagaaatttattgggaaaaaggaagcaaagaatgacttcctacaggacttgggtgcagaaaatcacttttgctgagtctcagggaacaggtgaatggataaggttatctgtctcatatgtacttctgtcccacctaatctccaattctgagcccaacggggcggctgtttatcattacttattatggtacactgtctaaggtcgggctcgaacttgctttctgtctccccactagcccattttcccaactgcatttgttgaataactcatcaattccccattggctggctgtgtatccttaatttcttcatatgttatatattccatgactagtctgttacgctggcccctctgcccattacacactgcg

SEQ ID NO: 122 - DNA, 122385 bp, Homo sapiens
  source 1..122385: mol_type = genomic DNA
tcaatgaaaaatatgttgtttatgtgtgtagttactagtcagtatgccccacctagccacaaattagtgtggttactctaaattgctaacatgaaaatcttaacctcctacttctgaagttatttggttttagctactcaatttttttttctaggcttccaaggttgctgttttgggcatggttttagaaatataattataagtttgatttcaaacttctggaccatgtaatcaagcacagactggtcatagtggaaaatatacaatttttagctctgcctacattgacaaaaaaaaaaatggctggatccacatcaattcaacttgagtgccatgtgtttacagtgacagtttctccccgaaaacgcaaaaaaaaaaaaaaaaaaaaaaagaagatccatgctgctgtagtatatgtacataggggtgtttaaagccagcccctccagcagcaccttaccaaccatgtctgtgcttttatttattgatccaataagatgacttaaatatctaactccttttccacgtaaaagtttttattatgtgcaatgcattgttaaacaggtgaagaatgaacaagtttagaaaaacaaagaagcttaacatggaaaattacccgcatggtgtccacttttcctgctcggttgcaatacccaatggattatttattaatttagatttgtgctgtccctgaatccaaacagcagcctctttagagtaacatctgctccagacattgctccaggaatataaatcccgactaaggggtggatatttaaagctgtaaatgattttttatttttacaatagctttgcaaaaggaacggaggtgtcatgtcatcatcagagttttcttaacaggatttaatcttaatgccaaactaaatcctttgtctaaagcatcagcagagttgtacttattttccccatagtattaaagaggagggctggtgcaggcacagccatatgacattgccttatttattttgtctgtttgttttctggaagaatctaggaatgtgcataaatacaattaaggacagtatctacaaattggaagaaagcatttctattctcttaaacctctaaatcaaagcacttaatgttctgatttccagcaagaccttctaataaatgaaaacccaacccttgggtttgtgttttgactcttgatacaattatgaaagacgcatcaggagatggcaagtggctgccagtacttccttttttctggaatattctctaattcttggtggatcaagatggaaactggtaggcttggaatagatgtccctttaaaaggctccactaacaatacaagaatattttttccatacgcagtgacgtgggtgggtcatgggtgtctcaatgacagtaacgttcccgaaccccggaccttagctgtcatttcacctgcgtcgtcccggacgccatttggctgttgacgtggttccgagccagcaaataacgccagcagccctcccagatccacgccggcccgtctctccgccggccccctcctcgcagtggtttctcctgcagctcccctgggctccgcggccagtagtgcagcccgtggagccgcggctttgcccgtctcctctgggtggccccagtgcgcgggctgacactcattcagccggggaaggtgaggcgagtagaggctggtgcggaacttgccgcccccagcagcgccggcgggctaagcccagggccgggcagacaaaagaggccgcccgcgtaggaaggcacggccggcggcggcggagcgcagcgatggccgggcgagggggcagcgcgctgctggctctgtgcggggcactggctgcctgcgggtggctcctgggcgccgaagcccaggagcccggggcgcccgcggcgggcatgaggcggcgccggcggctgcagcaagaggacggcatctccttcgagtaccaccgctaccccgagctgcgcgaggcgctcgtgtccgtgtggctgcagtgcaccgccatcagcaggatttacacggtggggcgcagcttcgagggccgggagctcctggtcatcgagctgtccgacaaccctggcgtccatgagcctggtaagggcgctgccccctgacagccctgggggcatcccggaggggggcggcagagggtgggactggtggcggtgggggaaggagggagggatgggcccaggggtgcctcttggtaaaaggtatctaaggtggaaggtgggaagtggagggagggatggaaatggggaagaacccgacttagagcgccagtggcccaatttctgctttcccgtcccatccccccagcaccaatcccatctccccagaccttaggccaccctctagtaagtataggcttgggaggctggggtggcgggggatgggggggatagcaatacagaaaaaacaaatcctgacgcacgcaaccccagcggtcgctctcactttgctgtgtgaaaaacccaaaggaatgattgcgagtcccccgcaaggggggttggtcttccttgctgacaagagtagaaagataaggtgcagaaggcagtgattgagaggaaaggagaacgagggagaaagagtcatttatcatgttttctctaatttccagaggaccagtttattggctctgtgtacccatctctacctgtgtgtgtatacgtattaggtacactcgctgctgtggatgcttggggaatcttagggatattgccaatctggggtggtggtgtataaagatacgttggtgcccctcctcctaccagggtgaaaagtggtttctgacttttgaaaccagattttgaaactgcacaaggcctttccaaggaaaaaggagtattccattttctctgctataaccatttgagatgaatagtttgtgatggggtctttattccaactgatgttcccaaataaccatctgtattcgtctttcctaggagtatattaaagcaccttttggtttatgttaattgtgatgcatttagtattaataaagaggtatttaaaaatgttcttgggacttttttcgttatgtttctgcttaggaaataatttgggcctggtcttctgataatcaaggtacagctaaagtaatctgtgctaataatatcagcatgggatggatgcttaatttttgtttaatgacaaagcaagcaagaaaagtaggctaaaaattctcagtgcagggccagtatagttttataatgatacgtaagaaccaaactgagaagagattaaaataagtgatcaatagacattttgatcttcaaatatatagtaggtgggttgatcaagaataaatcttcaggaaatatttcttaccttcaaataatataagaaaaaaaggttcatgtaagtttgctgtcaaaattctaagatcagatcctagaaaacatttaatattaactactcttatctaccaggattcagcatgtaggattggacattttgaaacttagtttcatactgttatctgaagacagggaaaaatttaaaatgtgataactgattttcagctaaatccaataaccaaagccaagatatcctaggcacagttaaagctaatgtaagtatttgtgagtctcctgctgcttacttaatgagaaccctttgttactctattttgtagattgatcccagagttttttgcgttgttacttcaagagattatatgaaagctaatgtttaactttttgttgtttcaaatttggaaataaaattttaaagtgatattacagttagaatgtgatatgctttagaaaatgaaaacaatgatttctttgcttaagtatctggaatatatagttcatcaaggtttgcaaatccttcttttagattgcaagctgtatgaagtggggaccctgattccagcacccagctcatgtttggcacacagcgggcttgaatatacattatgaaataatctacattatggaaaaatactgaatatgcagtgtggaaaaaatgaatccatcaatagctgcataacacagtgtattaaaataaaatgttttattcttcatacattcaaaatacgttgattgaattcctcttacagagacaaactcggaagtgttgtacaatatgtactttacaattcctttttaaatgaaggagactctaagtctatggtattactaatagaatacaaaatgtctgtgtcccttatatttttaaaagtagaaataaactattataaaccaacactaacaaaagtacaaggtgatatccccctccatcaccttttatgagcgtcaaggaggttagagatcttcaggaaactagtaaatatagagatctgatcagtatacaagtttgatggtgcttgtgtgaattaactttaaggaagtttggaaaaaggaaaatgttcaccattcttaaatggcctttcagtttcttttaggttaaactattttaagaagtaaaaaggaatacttattctgaggtacaagtgggctcattcagtgttttttttgagcacctgtatactcaaggtggaccaggcgtctgtgagttgtgcctctgcacaacccatagaagataacacagaagatagtcgcttgccctgagggcaatagagaattgggagcttgaagaacagcataaagggatgtgaggctgcaagatcggctttgggaggactggagaaaaagacagtaaggtcagcaggtcagggagactggattattgaagaattgatgacaaaagacagtaggtcagcaggtcagggagactggattattgaagaattgatgacaaaagacagtaggtcagcaggtcagggagactggattattgaagaattgatgacaaaagacaggaaatgtacagtttgttgacatttacaaattccaaaatagctggtatagatatctgtcttcactaggacccctgcttttgaaaaagggccaattgtctttactattttcaccttttaagtaccttattttttggtttgaaataacctttctgattcagctttaggaaataatattgaacttaagaaatgtgtttacttgactgaaattttgaggtgaaattgctcacttttgttttattttccagcaagagaggtgtcagatttgttgattagttttcttaatctagattcttttcctgaacattaaaaaaacagtggatttctaaggatttagttgtcgtaacagaagaactccaagaaaatacaacaacatacccacaaaaagccctttcttgtggtagaataagcaagctagaggtttactttgttagactagcagtttttggacagagatgtttgttgatacaattagctctcttcctgagcagaaagaagtgatctttatacatgcttggtacaggacatggggtgtagttgaggttatctcctgaaaatgactttctttgcaagatgttcaacttttgaattcatcaaaaggcaaagcaaattccattttgaattggtcattgaggaatagccaaacctattctgtgatgacatcttaggaatcagcttgattgttgaccagctgaatgttgggtctcagtcatcattttgtatcacttctgaggtctgcaaaaatctattgaaagagagttgcgagtagcagccaatttcaataagcagaatcacaaatggtcctgtcattggtctcatcttttcagacattgttaagtctggaccccagatgggtttcctctacactgggagttagtgtttgtggcccatttggaactgggatgaagaatgggcttagactaggctaggggctgattctaagtgctcaaatatgtccccattagatatcatacctgctaggcatgatcatttttcccgtttttctttccttttacttagattttatacttttttcttatttccatgcttaaggactcacgtattcaaacccaaacatatgccttcctaggcatgtatatccatcatcgaaatacagtactcataaaagaaacctttattaacttatgtctaagtaatggattctgtgttcccagaccactcgacccggagttaaatatgagttaagattaatttgcttaaaacactatttcttttacacgtagttcaagatagcttttgggaagtaaatctgatttatagctaaaacgctatctcaaaaacattctttagagcaggatttttctttctcaaaggctggaatgattattttggacgtattcctctctgaatctgttaaaatataaagtgtataaatgccagtatgaatttgccaaatattgtgatggaacatttaatgctggcaaagtttccacacaacttgaaaaaaataagtggggatttttattatttgtatggcgtctttttatagcagattagtatgtgttagtggcaaatggttacaactaagtaacaacttaaaattcgtgaagatagatgttagatcctagagaagaatctagacctaccacacatggtcaagagttatttttagacctgaatgagtcaacacagcttttgccagaagtgatgttcttgattgacttgtaattggttaatggaagagaaggcaagttgggcttgcccctacatgatagcctttgctcagacaaaagaggcagctttctgtgacaactgatttcagaggtggcagacgactcatttgctagtaactcccttaccgtcttaccacggggcgaaatcctatttctaaatattattaagaaatacaaaatagctcttgtaacgggtgacacattaacccagcttttctcaaaatatattccatagaacatatattcagcatggtttgataggcattatgtaaacaaagataaacaggtttgtatattgaaagacctaacagagctcttaataggctaatgtatgtttcaaatctccaagttagattcgtactgtataagatttcccaggcttttaccatgggatttcctcctctcccgctggctggtggctcacacctggttgaggcaggaggagtgcttaaggctaggagtttgagatctgcctaggcaacatcatgagatcctgtctctacaaaaaaataaaattagctgggcatggtagcatttgcctgtagtcccagctacttggggggcttaggagggcgcttgagcccaggaatttgaggctacagtgagccatgattgtaccactgcactccagcctgggcgacagagcgagaccctatctcagaaacaaaataacaacaacaacaataaaaaagggagcttatcttggaagtagtgttacacttccattagcccattatcattctttatcatagtattaaagattcatttgtcacatgagactggatgtagaacaaagaaaaaaatgattcagttggcaattctccagcagagggcctcatacagggagctcttcaggggtagggaacatatgttttccattttttccctccataaacagctagtgtagtggtttatgtagagtaggcttttaagttttgcttagaatcagagcatgattctgaggcaatgaggcagaggagaaataattttgtttgtttgcttttttctctctcttacagagctgaaaaggacacataattttgatgaaaatgattaaagttagacaaatgcaccacaattcttcttttattgttaaatagcttcatgctttttacttttgttcacctcttttccttgtgtatgacaagggaatacgttaagaacacagaactcacaggatcgctgtgaggccaaagtagtgtagtatatagaaacacatttaatgaagttgcttacatctggttattaaaaagaaatgctaatttgtaaatattctttttttactttcagttggtctggaaactgtgctccatggcctttacactcatttagagtaggcactcttggctgcatcgtcacgtgagatctgcctccaccaatcctgccaaatgctttcctcttaggatgctgttgcacaggcttagttgatagccctgaaggactttttccctcttcttactgttttatttttgttcacaaatgtttgcttttttttttttttttttgagatggggtcttgctgtgtcacccaggctggagtgaagtggcacgatcatggctcattgcagccttgaactctagggctcaaggtgtctccctcctcagcctcttgaatagctggactacagatgtgagccaccacaccctgcctgtttgccttttatcaattttaaaatgtgggacattcttgcttttcttcagtttgacatgatgatgaacaataatcatcaagcaagcttgaatcaagcaagcgtcactcaataggacactcaataggaacaaagtgtgcatcagtatttgagaatgtctttatggttgtttctttaggtagccaaataaatctacggcaatatcaacattttcattggcaatctgacttattttcctaaagaatttatgatgaaactgctccagtcctgactaacttagtcttttacagtctcagcagaagcaaaagctctttgaaacctcctttctccccgctccctaactttcttacccctgctggggctctttctttatgcttccatatttctttggagagctgtaaagaattacagtgtggactttgatgtcaggggacttgagctcaaatcctgaggcttcttatttttagctgagtgtccctgggcaagtcaattaacttctctctatctcccaaattcatcacctatgaaatgacaataatgtgatgattaaatgaggtggtaaatataaagttcttaattcaatatgtggcaacaattattattacctcattatggtatttcccactgttggtctacagataaatctatagacaaaatacaatcccggacaacaagaagctcctatagctcctgtagcttcttgtgctctaggattgtattttgtttatatatattttttaatcctgaatgtctagtattatgcttgggacatagtggccactcagtgaatatgtttgaataaatgaaatttctcaaataggcaaaaatgcatatcataaaacaaagccatgttggtcgatgttgacatcatgcatattagcatgccagtagtgtgataacaagaaaggatagagatggtacttttcttttgcatatgcttattttttgtgtgcactgaatccagttttgcataatggagaaatataccaatgtgaattacatgtcttttcaagtttcagtgctgaacttgctgtgtttgttgtctcatataactggactagtaaggggctgtcttccttttggaagagaagagtcttcagacatcttagaaagttaagctgctttttaagtgttaaataaacattttaaagataattggtaagcatttatttagtaaaattttgacctttaaaaactctgcatgagacctgagtgttgaaaactaagaactgtgtgcttgtttttaacacagaagatatgtatctccaggttttcattttcctttttctcatgaaatggtattcaaatcgtgcactttgaaatgccacagaggaggaggtttatccgagctacgtgatgggtcaaatgaacttaaatttgaaacatgtttaaatttgcccttttgtttccttctcattaattactggaattgccgtgagtccgttgctctgtgaacgtttctctttctttgaacattcaggatatggtgttttgtaagtgatctaacagccagctttttctaataaaacatggcctaagagaagagcctgtttgtgttactagtgtcttttatgattttcaaatgatttacccacttctttaactgtccctagatgagtaatctttgaagggtagggtggcacatgtggagtattaaagagatggctgttaagcaaagataaatgaattacttatgataatacaccgtggaacaactttccactactggtaaatattttgttttctacagaaatctctttactatcaaatcattgctaaacatcatagttctataataatcccctcatttgaagacatttcatttcaaacaaaggctcattattttaaaatggatgcaaattgtttattttctaaataagcctaaatataacttaaattcaggttgctaaaaaacctcttcctggccgggcgtggtgtctcacacctgtaatcctagcactttgggaggccaaggcgggtggatcacgaggtcgggagttcaagaccagcctgaccaacatggtgaaaccccgtctctactaaaaatacaaaaattagccagccgtggtggcacatgcctgtaatcccagctactcaggaggctgaggcaggagaatcgcttgaacctgggaggcggaggttgtggtgagcgagatcgcaccactgcactccagcctgggcgcagagtgagactctgttaaaacaaaaagacctccatgttggtcaggcttgtcttgaacttctgacctcaggggatctgcccgcctcggtctcccaaagtgctgggattacaggcatgagccactgtgcccagccccccaaaatttcttgctgtggttatgcatgtcaaggtaattagaaggaacaataattatcgcatttatttgctcaatgtaggcaactcctcatatgttcagatcccaaagtgatgctgactgattggacctatccaatttctcttcctatacaggcgaaagtatttaaaatcataaaatctttccttcactatgcagctgctagtcactgccattgtgtaatgttttctccaagaaatagcttatttctagaactctgctcaaaatttgcacaaatcataacctttagccatgagttcagggtagtgaaacttcaatataaagatcagattgtcaccttcctgacccaggtcttgaataccctttttccttttctttttttagccaagtggtaatttctaaaacaacctttcttcatagctattataaaatattactgtgtggcattccacactgaaattaactttccaagatgaaaatataggccttttttaaatagaactaataatttcaatgtaatttagggactatttaatgaacacctactatgtccatgccattttactttacctgttggtcaccctttgaggcaatgccattgcgttccttgaaatgtgttatttcatttttttgctttggattcactctttcacacacgttgagcttatattgcatactgtataaccagtggatacattacttgattctgcgtaatgcctgctgcatatgatgcaggggttgaaggcttctctatcttattcttaatgtagcaaacacaaagacaatatctgtaggggaaactactgaaaatgttaaagacatttgcaaaatgaaatactttttgtcctttttgtgttttagttgcagtgctggacatctgattttaaagtacaacagtcctattcaaacattttcatttgtctcagatcttgacattgttcagcacagattttttttctttaagtttactagaggaaaccagtcttattcattgtgggaactcagtaaatgttaagccagattttcaacataaccagcatcaggggaattaatttaatgcacttttggaaactgcattaactccacaaaatcaacaagacctttatagagctcacacaaagagaaatcagctgctacatgtattttctcaagagtcaaattcagttttgagaaaatgctaaagccataaaaatatagagatagataaatctcatgtgaatactattacatagatatataatgaatgatactatgtagctaaatagactgaaatacgatctagacatataggttttatttagggttcgatgatggcaagataattgtgaatgcagaagtcgtctttgttttaaatttcaaattagtttaactatttatatttatagatttcactcctatctataaaatagcccttgtttttcttgtttttacttctacttatagctattgtcaggaattgagagttttttctttaatctgagaggttggttcttgtaaaaaatatgatttctcaagaatgtttttttcaggaagttttcttgggctattattgttctctgggtttttaaacagttgggctaactttgcctttgctttcaacagaatgttaaccggataccttctgagataggttacaacttcatggcttcaagtattggttgtgctggagttgtcttcctccctggagaacagtccttgagaactaatttcatagccaaacatgctaaaactgttagaaggttgaggtgacttaacggccatttataaattaagctctgtaaaattatttggcaaataaatattattaaatgccactagcataataaatgaacaagtccaaacatctagtgaaaattagaatttcaattagatttaggacatattttatattgtcagtgctttattttcacagttgccaaattataaagtgaaatgtcttctcatttcttaaggagtctttttcaaacttgtctgtcttctcctggaatcaagatagtgactgcacatttcagagtgaaccatctggtgcaggtctatagtaggttcttgatgtgttgttgaaagtggtgagtgagtgaacacttcagaatgaatgacacacatattagatctagttatacacactttgccaaaccattgacatgcatgcaagcacacctgcttctccagctgcaaggcaaatagttatatcaatccataattctgccttccttctagaatggtgaccttgaggagaggtggctatctttggcagattaattactgtatccacagtgcttggcatgtatattttgtcaccaactgggtcttatgttaatgttccaccctaggctggtcgtgtttcttgttctggtgttttctatattgagccctggttctgtgttgccttcagtctactcagtgagatgcaggtcctcattctgttcttgcatttaacattaatttctccatacaatgggtcagactcagtacttaaaatacggagacttcctcctctggaagaatttttgccgccatttcttgattccaaatgtatgagctgcagaaaactttagaggtgttgaacatgtgcaaaatacctgataaaaatgcttctatgtgttaatgcataggaagaattctataaactttcctcaaattagcctccttcaaattagaataacttttgggttgaatgttattaaatacttagaattgtctccccattgtccataatgggttagtttcagtattccactggtcagtgtagcattgggattagtagcatttttatattttcatatgtatgagtaacacacatttttactctacttgtcaaacccatttcaatttctaatttcctctccactagttaactatggagtgaacatgagaaacttcattagaagagtatattcattttactcatgtgtctaaattgttaggttgtatgttgaggacaactctaggtttctctccagcagtgggaaacatgaactatgtgatatttttaatatttttgagatccttttctattgtttcgagacttctgagtatgctttttaatatagattcagattactggatagatgagagtgagggcaccttatgctattttaacaaacattttcccttctcctttgagtctatttcagtttgcacaaactgtatcttaaaaaattacacctaattttcagggacatcaattcagtgtgaggtatttttcctgaatagttttaaaactgttattcttgttgctgttattattttaacattgaagctgaactcattggatactataattttgtgacctctgcatacagggaaagtgaatcaatgagaatgcatttcttaaatgaatgtacagaagagtgagacttgttaatattttttcaaaaattcattggacaaagctaatgcattcatgggctccataaagacagtagtacagggaaaacattcatacctctgccaacatttccaaaaggccaagaaggctctcattcatggaacatatttcattttccataatattctcagccctcagaccaaggtagtaagaatactttattatcaaaaaggccctactaacaacttgcagtgtaaatcatcctaattggacagatcactgagaaaaaacaaagacattcattcaccaggcatttggaaattccaggtagaaatgctttcaaaccaggccacatttggaaatcaaactctgagtagtagagggctgtaaacgaaatactgcatctttcatttctgtataggttattatatttgtagcgcgaatgtacttatttaacaataataactaagtgcctcctatatgagtgacattctgcagattgaagaggtatttcaaaagggaacaagaaacaacagtattttaccaagtactttgtatgaaggtattgactctaattcttcagggagttataagagagtggtctacagtggagggctttcagaaggaggtggagctttgagcaggacttaaaagatgcataaggtatggaaagtcaaagagaggactttattctaagctagtaaaaaatcattcacatttcttgtgtctttttcttcattgttctgaatgtgtgacatataagcattcaagatacattgtgccagataattatgttccattaacatgtgaaattttcatctacagaaaatttttgtttagagaatgcagttttgggggtgctgtgctttggggctgatttccctcatcaagacggtaaaactatttgggatggagcatatactaatagaaatataatatacttatatatatatagtatatgtatactagtatatatactaatatatagtgtatatataggtatataatatatatttatatatttacatataatagtatgtatctataatatatataatatatcatgtattgtaaatatatgatatatgtatatgtaatatgtaatatacatatatcatatatttacaatatatgtatatattatgcatacatattcggagctaatctttgggtattaatgagagtgggagtccagagcctagcatatatgtaatatgtaatatacatatatcatatatttacaatatatgatatattaaatatataatatatgtatatattatattaaatatatatttatatattataatggagcttatacttatatattatatttatattacattattccattactatagtataaatatactattataatgatattataaatataatgaaatgttatacatattttattatatttatatatcatatcataatggagcttatcgtagtataagctccatcccaaattgttttattgtcttggtgagggaaatcagcctcaaaggacaacaccccaaaactgcattctctaaaatgaacattttctctagatgaaaattttacatgttaatggaacataattatctggcacatatatagtctgttataatatatcacatatataaataatatatatataaatcaaacataatacagttatatagtatataattataagtagaattatattaagcatatactagattatattgtaattagcaacaattgattactaatgcttttcctccctaggtagctattattgagcactctctagtaagccatggaatataaagatgttatgtaattttgattttgttaggctaatttccagcagttaagtatagttcaattagtgttctgttttgactatgtaattcaaaaactatgttttgtaaaaactcacaaaaataagaacaagaacaaaaaaagcaatgtcatttgagttattgaaggagaattcagcccatagattttctccatgctttggcagctgttttagagcattcatccagctgcatttgtctaacacttgaataatgatcatgcagtttgtcagatgcttttgggagagaaattcactatgcagaaatatttagtatttaactaatttttccaattataggtttttgattagggtaaatttattttgaattactcctgatgttaaacccaatcttcattagtgttccatagaattgtgaaacattagaattatagttttttcctagctagaaggagcactctcattttatagatgattaagttgagcttcagagagacattaaacaacctgcccaaggttttgaagcccaggaggcttggaactcattttctgatacacagttggacactcttcttaaagtatttcccataacaatgtacacagttggagaaatgaacataactatttcttactggtcatggagggtcatgagctgtttatgtgaactgaagtctgtgagggcattactggaatgtaacttatcagttatgttttcaaatccttagagcagaacttcttgacctgtgtgctgtaaatggctatgggtgtgccggaggcggatagacagggcctagggtggcaaaaaaccaggaaagcattgaaataaatcactccagcacactgtaagtacctacagaaaatgttatttttcttggcagtagaatccactctctaagaagaaacaagcttttgttggaagactgctctgataaactttttggagggctgggccttcaggaaggctgaggacctaaagtggataaaaaggagagggtatgtagagagtcagagggtatgtagagagtcagagagagagaagagaaagacttaagggctggtggctcaagagaaactttggggaaacagaaataatggatggggacatcagcagatctacagtgctccataatgatttgtggagtaaattactttgggagatgggatgaagtgctttaattttgctttgagttagggactggtaaaatccaagattgcccaaggaaggactgttccatataagttacaatacagttatgaaaacttattagcaaagatcagatacctactataccacagtgcttctgtgaatagattcaagtaattttttgaatttaagcccggcatctcccacatgactgaccatttaggaatcctggtcctaagagaacatgaccattgggagtgggcctctgggaagggtgttgtggtgtgcaagggcaaccctcagttgtgtgcaccacgcagaatgaatcatgtgttgtgtcgctggaagttaagggtgaataatataaataactaaaaatgggtgaggtttcctgttaaaaaaacatactcgtgttgatctgttcatgtgtctacattacatttcaatgtgattcagtagggaggatttcttgggcccagtagttcgagaccagcttgggcaaaatagcaagattctgcccctattaaaattttttttttatgtgaaaaatgttacttgtgctgaaggggatcacatatttgttgagaatgttttccaaaccaacaatcatcacacaatttctcaaaggactttatttccaggtttgtgaaagttttatgaaacatattaaaatgttataagaatcattgataatatattgcatgtttaatgaacagcctttattaaaaagaagaaatatataaaggaactatatctggaatgaagagcctccttaaatgattggacagaaaatagtggtatgaattactgtaggaatttaagaatatatgatatacgtgtgaatgatgtttttttgttttgatttttgtcctgtgacaaactctaccgaaatgattagttgatgaattctgttggtaatttatagtcaggatattagcaagcaaagtattccaaagtcttctggctgatgtttatgtgaaagggtgtgttctcatatgagcaggaaatgggctaataaggcaatgaaaagactggagataatttcacggttaatttggggtaaaatttatttttattataatattatttgtggtgaaagtattaagtctgaattattcagacaattgctttaattctccatttgacatttgacctgtgcatagagctaacctttgggtattaatgagagtgggagtccagagcctagtcaagtaagagattaggaagcagagatggaaagaaagttctacctatgccaagggtcaatgcacagtactggtaatgatttgattcggcagttttattagcagccatttctttgacagactaataaaaatgacttacagattcttttccaagttatcttatataaatggattatgatgaaaaatgtgtgaaccacatttcatcttctttcttgccttctgttaaatatgtgttcagcttagaaattaaatagcacaggatagaacttgaaatcataaattctgtgcatgatatgtagttcaaagggattacatgataattcacatgtagagaattgtacaggatagttgggaaatgtttctcaaccctcagagaatgctcactaggcacatgcataacatgtagatgcccaaagcatttcagaaatagaattacaaaaaacccccaaaacacttgtcatgaaaggtttgtgaacctaatctcgcctgtatagactgggctaattctgatagtaagaggagttctcccttctcttaagtaaacaaaaactattggctttcatccaatcggttattctaagaccactgcaacttttttctctcacaaaaaggagttgccctaaagaagtttcatttgctttgatcttttttttcctccctcctctaaaggaaaaaaggtatgtgtgtgttgaaatctaaaatatggcaaagtttccatttaaaaatactttttagataaccagatttgctcttcgcacaatgaggtctttggtccctgggagatattttatatcatattcctgaatttgttcctggagtcatctttaacggggctagggaacttattgggtgctgtaagaactgttggtatgacccaccatgctctctctgtctctctctgtaactcctacaacttgactttgagatagatctaaagaagtgagctatcaaatgttggaaatatcaggtaagaagttaagataggctggtcatggtggctcacacctgtaatcccagcactttaggaggccaaggcaggcaggtcacttgagaccaggagttcaagaccaggagtttgagaccagcctggccaacatggtgaaaccacatctctactaaaatacaaaaattagcagggtgtggtggcatatgcctgtaatcccagctactctggaggctgaggcaggagaattgcttgaacctgggaggtggaggttgcagtgagatgagattgtgccactgcactccagcctgggcaacagagccagattctgtctcaaaaaaaaaaaaagataagggagattattaaaaacaataagatagacggaaatataatatttaaggttagagaagaaggctgagtgtggtggctcactcctgtaatcccagcactttgggaggctgaggcaggacaatcacttgagctggggagtttgagaccactcagactcacttgagaccagcctgagcaacatggcgaaaccctgtcgccacaaaaaaaaaaaaaaattacaaaatgttagccaggtgtggtggtatgctcctgtagtcccagctactcaggaggctgaggcgggaggatggcttgagcccaggaggttgaggctgcagtgagccatgatcacagcactgaactccagcctgggtgatagaatgagaccttgtctcaacaaataataaaaattaaaataaaaataagaaagtgaagccaactgaaaacaaaaagtattaaaacacagagaaagttagaaaataaagtttaaagatgaaatagaaaggccaaggaaaaatgtttaaatgttgtggagagaatatgaatgtactatatattattgctcacccttaaataatgcttggtatatgccaagtgatgtttaaaggcacgacttacccacatatcccttatgggtttggtactataattatccccattctataaattaggaaactgaggcccaaagagattaaatgatttatttaacatcacaggtttgtaagtggcaaaaccaagattagaatatacatgtatatatagctacattcttaaatacgcaattcggtatattagacacctatttattttgtcttcctgccttctgatattagctcctctcttcccttcttggggaaatgttccttcttaccatgtgacttgagtggaagatgttgccatgttcttagacactctctttccatgctttcaaagtaagcatcctttctaccatcttatcttgattatacaacgtatttccaaatattattttagattctctgcattttcatcagataaaacaggattatctcccttttataggacaaataatcatttccacttaaaaatggagctgtattaaaaacaagcttttggccaggcatagtggctcatgcttgaaatttcagcactttgggaggccaacgtgggaggattgcttgaggccagaagtttgagaccagtctgggtgacatagcaagaccgtgtctctaccagaaaaaaaaaaaagaaagaaaaattagccaggcattgtggtacatgcctatagtcctggctactccagaggctgaggtgggaggattgcttgagcccaggagttggaggctgcagtgggctatgattgcatcactgtacacagcttgagcgacagagcaagtcctcatttctaaaaaaaaaaaaaaaaaaaacaaaaccccactaaggttttaatgttatcttgtacattcatactaaataatttagaggctggtaacaaaaagaatattgttctggtctcaattaattaattattctaattaatacataaacttattttattaattgcttatttacatcagatataatattagtaaaagattgataagagcatgtaccagtgacaattttctgagacattaagatttttctttatgtttaggactattagcctacaactgctaatatatacacatatatacacacacatatacacatgcatacacatatacacatatatgtatataggtgtatgaatacatataggtacatatatacatataggtacatatatacaaatgtgcatgtgtatacatatgcatacacacacatttaaatggagtatgtttatctagaaatcaggaaagttagaaactgagagtaaataaacatttaaaaatggagaggcaagtggcttttcaagatagccctgattttaggtcaatggaaaaaatctaagcagttattttaactaaagtatctggtgatcatagtttggaagatctggaattttaaggtgggtggctcacttgacttgaaaatccaatattttttctgaagtaggtgttgccatggtgacagaacggcttagcaactgaagacagatttcattggctggctgtctgcagacttgcttgttgagtggcattaatatgttgcctcctgctgttttttttctgaggagaccatctggcattagctgtatttaaaggtacagttctgttaaacaaagaataccaggtgatatacactgaggtgttaaaaatatgttttgcaggcattagttggtttaatcaatcaatgactaagaagttccacttcaaatcacaacctattataaccaattaattcactattctaggctttgacagtaggcattaaagggttttattgtggtacttacttatattataaaaatttaattgcctaaatgtactatactaaatgatcatattaatcttgatgtgcctaaaaattaatctacttgataaactgttctctcacattatatgttcataaaccagagatgtagttttaaaataatgtttactgaggatgtttaatatatcagagcataaacagctgtcagtttttcttttacttttgagggtgataaaaataatggattttcaagtaagatgtattaagatgtcaaatgcatctattctactaattataactgttgattctaaacaataaatacctgttgtacatctgtgaaaagacataccctcttttttattttttgagaaagagtctctgtcacccaggctggagtgcagtggcacgatctcggctcactgcaacctccacctcccaagttcaagcgattctcctgccctggcctcctgcctcctgagtagctgggactacaggcacacgctaacacacccagctaatttttgtatttttagtagagatggggtttcaccatgttggccaggctggttttgaactcttgacctcaggtgatccacatgccttggcctcccaaagtgctgggattacaggtgtgagccaccgtgcctggccacatatcctcttttaaaggagttccctatatactagggaggataagacacatgcatatgttatgataagatagaaaatgacaagtaccttaagagtaatacaaagcgaagtttgagattgaagaatggaggacacatttaataaggatactcaccgagacttctgattggcttaatcttgaccagtgtagaggagagaagagaattctaggagaaacagaagcaatcatcagtgttataatcccagcctctctaagagtgggttccaagataatgttcagaggataataacagagcactttgtgcttagaccttactgtacatgtagaggaagcaaaatctttacaagtaggtctttggccatatcatgaatatccttaaatgctagactgaggatttagacttcatttgtttgggagttaacagaaatagatcacttgtgcattgctaatttaagaaaaagatattgtatgcttttgacatatttagggaggtgttgtggacccaccacctggagagagatatatggccagcagtttgaaatgaaattcatttcatagcagaatttgaggacagaggaaaagatttaggaatcacttgcatgactggtgagggtgaaaatggtgattatggatgagatgactgagggagggagaataggcaaaggagagaaagtgtatcaggcagaaacttagaacacaccaacatttttaagattaaatgagcaagaagagagcagagagatgtagtcaaagaaagaggcagtaggtatgattcagagctgtagtctcaagataggactgggggcatatgacgatgcccagtgctgtggaagttaatgaagcagaggatacagtaaaggtcactcactcccagcactggttggaagtcgctggggacatttggggaagtagtttcagtagagtcaagaggaagaagtcaaacaaatggataaggagtaagtgaagggcagtttcacctctaacactcaccttttctctcacccattcatcaaaccaagcctttcttttttaaaggctagtcaagtgaagcagtgggagtaaagaaggaataaactaagttttttgaaagattacatactattttcaacacacattcattcctgaactcatatcattgtggcagtcactgcattactctcttcatatggttctcacaaagggccactactgacttcttaatagggtgaccttatgtctttgtttccaacatattcagtgttcctggggtatttgttaatagagccctctttcaccctcaaaactgtcctagtttggatgataaattatgagttatcccagctcttcatcaccagttctaatgagccgttttcaatctttatcttacttgaccttatttgattttttttttctttacacagctgactactcccctttagtgtgacttgaaaccccacttctttgatttgtactggataactcttctggttctcctgacaccttctcagtcttttctgcggccttctcttctgtacaccctgtaagtggtgccattgcttagagttctgttcttggtttcttctcttcgttacacgccttttccatagacaggctcactcataacaacaggtgcagttaactagaagccggtgaaggaaaaatataacccttgtttctccccagtgagctttggatttgcacatccacctgcctagtacacttttactataagtgatagtcaacatgtggataagaacttgagcattggagtgagacataaggctgccaggtctgccgtttaatagcttaatggccttaaagaagaaagtctttatgtggctcagcttccactctgtaaaatcatgaaacctgtcacgtaagatttatgtgcgggtaaaatgaaatagcacatgtaatgtgctgagcacagttaatggcacacaacatacacttaatgaataatagaaattattattatttcccaaactgtattctcctctcattatttcttgtcttgtggaacatctgccttcctgagtggaggagggtttatgtgtgggggaacatgaaatacttttggaaagattgagtgatgccacaatatatgaggccctggaagctggacagaggaatttagacacaatggtgggttacaggggcttctgcagtcttgtgagcatagaatgattctgtggaaagtggtgttgtaataaaattagttattttaatattaagccagatgtgtttaaagtaggggtcgggaggctgggcaaaaggctgatagagtaatactggcataatttgatgaggacctggaaaggtgtggtgacaatggaatgaagaggaaaggataattagggaaaggtgataaatggacagattattttattttttatatcagttctttcttcagaaggttgtgagatatttccatcaaaaatatatatttaataaaaatgtaataaagcttctttatggatcaagaagccactactgttttgtacctatttatttgtgaaagagaaggaaaatgtgctaataataatagtggccaacattttcagcctgattctctcagagtttgcttagatgatcatttacctcttcagatctttgaaagaatttcataaatgactggtcccatttgtaacctttattattctcatagttacacagaattgttgagatgcatacttcagtattaaaggatgttggtgtttctagtgattctggccggttacatgacaccatgtgatacagtttggatatctgtccctgaccaaatctcatgctgaaatgtaatgcccagtgttggagacggagcctgttgggaggtgtttggatcacaggggcagattcttcttgaatgacttgacactatctcctggtgagttctcgcgagatctgattaagtgtatggtacctcccccaccttactccctttctctccatgtgacgtgcatgctcctgcttctaccatgagtgagagctccctgagccctccccagaagccgtgtagacgcaagcaccatgcttgtacagcctgcagaaccgtgagccaattaaacttcttttctttataaattactcagtctccggtatttctttatagtaattcaagaatggcctaatgcaccatgtaaattaaaatatacacttgcaaatatgtcacaaaaagacttactctcccccgaagaggagtcaatacaaaaacctgaagaatgtggcaagtggaaaaacagaaatgagaaaactacctttgtttataaaaaatatttttaagatattttttctttggaaatagattgttcttttgaaatctggaatgtaaaatgccagactcttcttctgtttttctggatttgaaacaatcgaacactgggaaatatctgatcctgaactaaaatgcaggcacaccaaatttgaactcagattgaaaaagttaacactgggaatcaactagaaattaacggtgattatgaagaatattttgattgctatttgattctttcatagctctgtaaaacttatgtaagcaagctattaaaaaacaaaagctgaaggcgactgttttatgatgtgtgtatcataaaggaaaccatcaccacctgtcattgaaaccaggaaaggctcatgtcaactaaatgtgaaaagaaaacagtgtaagaaattaaaaaaaaaatcatattcttgaggccatgaaacacatgttccagaaaacagtttattagaattgcattaagtaaaaattaatgtctgcacactgatggggaagcagtgtggagtggtatggaaaatgttagagcagtctatttttgtaaaatctggaagttggaataaataatcattggggccccagctctaaaatcctactaccactattaatgtgacaatgatttaatttttgaatgaaatttaaattgtaacatatgccatggggaatgtgttttctggcttgctaacaacatgaaaagaggatgttgaaagcctcttgtaattcatgtttttaatttcattctttttttttttttttttacagagtttggtttttattgttatgtgtttgtctgggtgcagaattgccctcaccacccctggccaccctggcctcctgacaggaacaggcaaagagatggctccagatggctcttggctgccactctaggcctcagggcttatacaatgagcacagtgggttccaccttccaatagcgcaaactctaattcacagtcagatttcaccaggagggggagatgatcttggctgaaggcactttaatcagggagcaaacccaatgccggagtttgtcttccttctcgttactctgataaatctagatgccactctgttggagaaccagcactgccggcagctggggttagtgcactgactgagtgaggcatgaggcctgctcactgatgaaacttcttgttagggctgttagtgtggtcagctagcagctggcttggggtgaactcttttccataggcagcctcatacttcttgagccggtccactatcttctgggcttcatacagatccacaaagcagaaaggccctccaagacaaggtgggaagctgagcccgaagacggctccaatgtctccctctgcaggtgtggccaagatcccctcttgcgggcacgtgactgcctcattcacaaatcttgtcagcaggcggaactggatgtcttcatctgaggagacttcagacttaggaggcatcttcagacttgctaaaataccgttcatgtcagaattcaaattcttattcttcacactctcctgatagatggaaaagcccttcccagactggcgacctaggaagcccttggacaccatctatgtcagtagttctgggtttccacctccaaactgctccccaaaggctttgcccagatctttggccacatgtttcgctacatccacgccaacttcatccaccagtgtggcggcacccacaggaaggccaaggcttgtggtcagggaatccagcttctttgggtcaactccttcctggaggattcagatgacttcagacatcatgggtgcaagacacctggtagtatagaagccaggtccatccttaaccacaatgatgaccttcccctgcttgagaccgattgctacagttgaagcactggtgtctttggaagtcttcttggttgtgatcatctccagcagctgcatcttgtctgcgggagagaagtagtgcctgccaatcaccttctcaggtcttttgctgacagcagcgatttcactgactgggagaggagatgtgttactagcaaagacgtagtgatctggaatcactgcttctacttcctttagcactctgtgcttaaaactaaggaagttgtgatggatggacagcatccatcaccatgtctgtctttcaaaaccttggtaatcaagcttcccagtcaagttgctgaagatggaatccctttcaaatgacgttagagctttcttctttactttgtcattcaatcctttgaacacttgttgctgtcctcagcctaacccagtgagtgtggcatctttaagtatagtctttcgccccttatccacggagacttgggcaatgcctgctcccatcatccctgcaccaggaatagccagatgcttaacatccttctgtggagctccagatgtattcttcttgcacaggacctgaccatggtagagtcccatcaaggcctttgattctttggtcattgcaagctctccgaatttctgagattcagagagataaccagcatcgctcccttgctcaattccagtctttaccacatcaattattttcagaggtgtgggataaagggaaagccctttagtccgctttcacactttttcttccacttttttgtaaatctgttgcctgacaaatggaatagtcatggcatacgctgttaatttttccactaatcccttgtctctctttggagagatcttcttatcagctagtcctttgggaaagtaattgcaacttcttctaggtatttgattgtccattcctctggaagttttagtcctggtcgcagagattccaccaattggtcaaccagtcccattttctttgccctgtctgcacggatgtttctgccagtcagcatcatgtcaaaagcagcaggcacacccaccattttgggcagcctttgtgtgcctcctgctcctggtaagatccccagcaagacttcaggagcaccgaatactgtttttctgtcttttgttgctattttatattggcataaaatggcaggatccactgatggcagtcacaacaggctttatggacttttcaagtttctcaaatgttctctgtgcttcttgtggtatctgtgttacttcttgaggggtcttgcaagtggctaaaatgttgatatcagcacctacaataaagcagcctggctttggtgagataaggatggcacttctgatttgatcactagcccagatttcattcataacttccgtgaactctgaatgcagctgtttgtttattcagcgtatttatctttgaatggggagagttaatttaaataactatcacatcccctttgactccatagttaatatgggttctggtcagcaaagcaaaggaccctgtaaaattgcggcgtatataaccttgggagcggaggatcctgaaggcagagaagtggctgaggctgccaatcgcccggtagaccaccatgttgagctgaagagaacagcagtggagagcgcttctctttaatttcattcttatcttttgtattagctttttaaatgtattataaccaaggagaatacaaatgaactgacttcacagtttttccctcagatttcagaattgtactgttcttaagctccctcctaaaacttgtctcttttattaaatattttaatatttaatggctgaaaatctttgtggtcattattactttgttgcagctttattgagatagaattcacataccaaatagttcacacaattaaaagtaaaattcaatggtttatagtagatccacagtgttgtgcagccatcaccacaattttagaacatttatatcatcacctcaaaaagaaccccatacccattagcagttattcctcattttcccaattcctcccaatcctgctccaacaactctaggccaccagactaatcgactttttgtctctgtagatttgcttattctagacatttcatataaatcaaattgtgtgatatgtggtcttttgtggccgactcctttaacttagcataatgttttcaaggttcacccatgttgtagcatgtattagtactccattatgtggatttaccatattttgtttttccattcatcagttgatagacatctgggttgtttcaattttttgtctatcatgaacaaggctgctgctatggcacttatgtgcaagttttttttgtggatatgtgtgtttatttcttttaggtatgaacctagcagtggaattgctgggtcatattgcagttctttgtttaacattttcaggaactgccagactgttttccaaaatgactacaccatttacattcccatcggcagtgtacaaaggttccaatttctctatatcctcgccaacttgttttttgctgtagttttgattagagccattctactgggtgtgaagtgatattttgatgttgttttgatttgcatttccttgatggctaatgacattaagcatcttttcatgtgcttattgaccatatgtatatcttctttggagaaacttccattctttttttttttttgagatggggtccggctatgttgcccaggctggtttcaaattcctgggctcaagggattctcccacttcagcctcccaaataactcaagtggattgctgggattacaagcatcatgccgggcttcaattttttctttttttttttttgagatggagtctcactctgttgcccaggctggcgtgcagtggtgtgatcttggctcactgcaacctccacctccgaggttcaagcaattctcctgcctcagcctccagagtagctgggattacaggcatccaccaccacacctggctaattttttatttttttattttttagtagagacggggttttgccatgttggccaggctggtcttgaactcctgacctcaggtgatctgcctgcctcggcctcccaaaatgttgggattataggcatgagccaccgcgcccgacccaactttttttttttttttaaagagacggagttccgctgtgtctcaaactcctgggctctggggatcctctcacctcagcctcccaattagctgagacaacaggcatgtggcactgcacctggggctgtctattcattttaaaatgggcaatttatcttattattgttgagttgtaagagctccctacgtatcctggaaccaagccccttatcagatatacaatttgcaaaaatcttctcccattctgtgtgttgtctccttactttcttgatagtgtcctttcaagtacagaagttttacattttgatgtggtccaatttatgtattttttcttgtgtttcttgtcctctttgcgtcatatctaaaaaaccattgcgtaatctaaggtcacaaagatttacacctacgttttcttctaagagtgttatagctttaactctcgcatttaaatcttgatccattttgagttaacttttttatcggataagtagagggtccactttccttcttttgcagatggatatcccattgtcccagcacaacttattgaaaagactgttattaaaaaaaattccatccctcagcatattttcacaagtcatgaatttcataagtgagtagaggcaactcaaagatagcaaacaacttgattaatatcattggctaataaagggcaccgtaggaatttaaaagccttagattatctgcttccaaaacccatacttattccaatataccagtggttctcaattttgagcctgcgtcagaatcacctggagggcttgttaaaacactggttgctggggtcccacccccagagtttgattcagtaggtctgaggtagggcctgaaattttgcttttctgtcaagttcccagggattctgatgccactggttcagaggccacactttgagagccattgtaatgcactgcgatggttcccctgtgtatcctgatgctcgaagagccttcagttggggtggagggagacacagagagaataatataaagacaatagtagtgacaaagggctaagtgtgcatggaggaagaaaacagtaattctgattagaatattgaaaaaagtttctgcaggacacattatggaatggattggtttatggataatctcaagcatttacctccacctggtgaaatcagacagcaactgtctcttcttacatttatttggccacaagtatgcttagagcagctaagctcttgagcacataagcaagtatatggcggagtgggtggtggttccggaatggttgacgtgggaaatgcagagagagcacttaagtgtcagattatgacactgaatacgggaaagtgatgggagtgaggctggttaaaatttttcacccacgcagtctccctgtgttgcccaggctggagtgcaatggtgtgatctcggctcactgcaacctctgcctccagggttcaagtgattcttgtgtctcagcctccccaatagctaggattacaggtgtgtgctaccatgcctggctaatctttgtatttttagtagagacagggtttcgccatgttggcctagctggtctcgaactcctggcctcaagtgatccgcccgcctcagactcccgaagtgctgggattataggctgagccgctgcacccattctccactcatgcttatatcccacagtcaggttcagtgaatcgatgccacttgtgtgagagactaaaataaataatggatttaatttgatgactttttttttgactctgaatctttcagtgtacaaatgaaatcttgataaagaaaatatcaataatagcagtatatcaatgctttcctaagaaactgtgaaatactgtggtgatcttatcctggaacaaactaggatgagccagtctttattagattattttgtactatatttatacttactttgtgatcattcaggaggacccttcatattgttgaatttggtaaaatttccttgcaggcctaggttaatggggtttacaggctctcaggattgtgtgccagttgtcctctttctaaggtagttttattcataaaccacacaggtttttttcaaaaacacaaaaaacacagacaaacaaacaaaaaaaacagaggccaggtgcagtggctcatgcctgtaatcccagcactttgggaggccgaggtgggtggatcacctgaggtcaggagttcgagaccagcctggccaacatggtgaaacccctttctttactaaaaatacaaaaattagctgggtgtggtggtgggcgcctgtagtcccagctacttgggaggctgaggcaggagaatcgattgaacctgggaggcagagtttgcagtgagccaagattaggccactgccctgtaacctgacagagggatactctgtaaaaaaaaaaaaaaaaaaatcagagattttaacaggtcaatcttgaactatgtgaacaacttcaatttataaaagagtaaaaaaatcgttgaattacagaactatgaactgactcctttttgatgcagcctgattattaatagtcttgttcacagctgtgcccaaagtagaacatcacaccggcactgggtaagtaaacaaaacaggccagtaactctgccaaagacctagctattaatggcaatttatttttattacatatttggaatcttgtcatcccagaaggtgctgaagtagaaatttagtaatacttgatttaagaggcagaagtcctgtaagtttgcagctattaaaaaatggaaagaaaagaaaggttacaaaggggaggggaccatatctgtgtttacatttgttcctttcctcaaatggaaggtagaataatgtattagaagatattttaaatattaatatctaactgaaacctgatattagagaatgagaaaattttgctgaaaattaattttattttcttttaatttatggtgttactataccttttagatttaggaaggcagaaagactgtgtgtgtgtgtgtgtgtgtttgtgtgtgtgcacttgcactttggggttccctttctatggatgtttcaggatctgaggataaaggatcacagtctagcagaaagctgggtttcaggggacgtcaaaggtaatttcatgactatattagtagataaatcgaagaccagagagcatgctgaatggaggacatttacatagtctttccaatgctaaaggaaatagggaagtgattatttcaaaattacctagaggatcttgagcatagtatgacttaagataaaaatctcattgtttctgagagttggcctctttctcctctccagatgaaatattttttcctttttttctcctccgtggaaagaaattattaattaaaacaaaaagacattgttggaaagggaggttttttagtcgcctaagagaggtgctattagtacttgtttatttaaaaattgacttttggtcaaactaaactatacaactttttctttttcaatccttcttccctccatccctcttcctttctttcttcctcctactttttgcccttcctccttccctgatcccttgttttatttagtttatgtcattccacagagctcacagttaccacctggtaggtacccttgacattctacacagttggtaaatcagtgtcataccagttgctaaataattggccaggaatagcctttatcaatgaatgcttcttctccttttcactctccattgaataaagatggaaaccagctttgcctcctttttgagtatggcctgttgatttctaatttgtcatagctcacatggaaaccttgtgatgcgcttgagggggttttctcatggagacctcaatacctgtggaatgtagggcacatggcaaacagatctggtttatctgatcaagtgattaatgcaataaaaaattataaaaattcaaagtgaaaagtgtgctcttgttactgtgtgtggtaagtagtttagtggattctggttctacccattgaagcactatacctgtggctggtgatggaggcgaaaatcttttactggaaggaatgggaagaagggtagtgggggccagagagtctctacgttcctccaggaggaggaaaccatctctttaaaatgacagtgctttccttccacgaaagaaccataatttttctaatcattggtaactattttggtctttcaaatgtgtcaacaacttgtacactggaacagcctctgtctacaggcagagcaggattcagtgatttttagaaggcatttgggccccagccagcctgaaagttggggtttacaactgtgttaaacagaagagattttgtttgaaagggtaaagcacatcatggaaaagttgaggaagaaacaaaagagaaagttgcaaacttacctttatgtttataagaacagatatgttcttgagagattgtggatttttaaaaatatgatttttttggtggtgggaaaattgtagacattaaatatcttttttaagttatgctgacaccttacaattacgtaatcctttataattttcaaataaatactaacattagtaagcaagtactacataccaggaaaaattctagttgctggaaataagacaataaagaaaacagggattattttattaagtcctctcaataaagcctatgaatcagttactattattatctcgattttacagattaggaaactgaggcacagaggagttgtgttacttgctcagagttttcatagtcaggaactggggagtaaggtttgaaatccagactccaattccagatcctgtgctcttggcaccactcagtcctgtctcaggcaggcagcattgccactgtgcactttatcctaaaaacaaccctctgagggaggtgagaaaggtatgtttcttcacatttaaaaaatatgaacatgtttaaaaagtaaacagtgatctatttacatctgtatgctgggaagaagttctagagtcatcatcttcacctcttcaatgcttcagtcattggcttcccagcctctaagcagccatgtattccatttctttttgcaccgttataaccagtgattttctcgaatccaaaatctgtaacgttcctctgcttaattccctgcaggtgctcactgttacacctagaatcaaacccagacttcttcgcatgcgcttgagattcttctggctgggtccctgcacacctctgcagtgtcacacttgcactctctgagccctagctctacagggcttttctcattttaacaaaacttgctctttcttgtctctcacatgttgtatatgccagttccctggcctcaacattcttttcttcccctcttccctcttactctacccttcttaagtggctattcttgtcccttcttttcatctctaccttgatgccatgtctctatagtgtgttgtaattgcatgtccaacgccacttttcctgagtccacgggcctggaaaccatgtgatgctgggtccaaagtgaagaattgggggatagagaacgggaatcttgttcacacagttctctccagtacccagcatggtgacccagaacatgtacatgtaaggcatttgtacatgtaattaattagcaggcatgttttgaacaccagcttcattaggagtgatgccatatttgaggcagaaacatagtatgatggagaattcaagaggctttggactcatagctcttagctgaattctggctttatcagtactacctttgaggctttaagcaagttacttaacttttctgagcttactttctcaaataaaaagcaaggataactaaaatgctttggaaactttcctgtgagaaattgatgtgtaaatagataattaagggacatgctaggagttgtgttacaggcatgaacaggaacacagaggaggggacaaccaacacagctcaagaggtcacagaagatgtcatgtaagccttttctttttctcagagcctctggcattgacgtgcttggagatacctgaaaattgggcagctgtttatctttctggaaatgtttagtcaaaggtcttctgagcatggagatacaggaagtgatcttccattcatgcatatttatgattctattctaagttaaattattaatagcatttgacgagtattctattttgatatggacaagaaaaatcgttcactttgaaacatttattgagctcgcttatagcacactgggaaaaaaagtcttggttttgttatttttctcaaaagatttgtatgtattttcctgcaataataaaccaaaaataaaatccatgaaggatctagaacttttaaggctatgtaattcatattttaagcctttactgtttcataaattatttaaataatttgaggaattactattgaagagagtcttaatctgtcaaattgatcagattggatttatcttgaaaacagttctgcatctttggataaaaatctattttattccaaagaaagctttttttatggcaaataaaagcaaaggtatacatttttaataatcttatgataaataggatgatctgctttaaagaagagtaagtttatagagtcagagtatacttgtacacacctcaaagtcaaacgtttgaaaaatgaagtttgttatgattctaagtgtagtttcgaatgtaagaaaaagttaaaagtgtgatgcagtcaggaagcttggaatattctcctgcataaattatatgtgttaacagccttagcagtattctcttgtaggccacttggctccatcttaaagtagtttgatgaatattgactggtctgcaaaatttgacttaagaaatgttgagccaaagtatcctggataacgtagatatagagataaagtaatatatatatatacacacacacacacatacacacacacacatatttacatatatacacatatgtacttatttacagtgtatataaaaaataatttagaagaatgcatccagaaaccaaattgagcttgaaaagtaccacctcacatgaccgcagggacagctggttattgtcttaggatatatttgcattttgaagtgaactttagtgacattacaaaatgccagattggaaaaacagccattatttaaaaaaaaaaacaaaatataattagcaccagatgaatgagttgtctcataatcacctcattattacaaattaattccaaatgaatatgtttgaacagggcattggttttgaatctttaatttatctcctccttagccttgctgctgacaaatcataaatagatataattaatgaaaatgttaatagtgccggtctccagaatatctctagatcactgaccttctgattggtggaaaaacctttggagaatgatctttacaggattccatggcagtgagttaatctatttttctctacatgggggcagcagacgaggtgagtttcttcctctgtcatttgtaggatctactgttattctctggagagctattgtgtcagaacggatttggattattttttaaaactactgctacctagagggtaattttattaaattcctttatcatttggattaaatacagcaaaatgaaaccagctcctcctgctcagaggagctgtcaccacaatctttaatattttcttagcattatttcctttaaagtatgctttgggacaattaataatgactaatacttaaattttcactatgagtaaaagctttttggtaaacatttattatatattccatgtcttccttttattctctaattatttcacctattcacctaattattttgtagctcaagtgtataatttaaatgatgtagaaatatagagatcaaaattaatacaaatacatttatatagtgatgtgttacatgttatatttgtcacaaatatagcatatatttgtttgtctagtacatatatagtatatacagtacatatatattacatacatacatatagtacatatttgtgtagtacacaggtatagtgcatatatatatatatttgtcacatatatagaagtcctgtgtcttccttttaggtaacatgggagaatgtaagtttttgttttcggtccaagaatgacacagatttttttgtttgtttagttagttttctttaggatctagatcccccagaggtaaacactaaatataaaaccgggaattagaagctggccttgggttctgcagttctaggcatggcgttaacgtttttcttaaaacttaaggcccagactacacaaggaatcttcccgcctgcactcccctgccagctcagctacttccctactcctgcgccaactcaaccgtaacagtagctgagacgaaagcattgctctgaagtaaggtgtagggaagctttctggcttccttaataaagttacacacgatcttctaagcttggcgatggagggagaaggcacatgggagggtcttcaccgatcctctggccctgactctgcctacccttcattcattcacctgcccctctgggggctctgggcggtgaccactgccactattgggctagctagtggtgggggcactgctccccttaatgctctggcccctaggggagacacaaaatattgttttaaatttccagtagtgtagctcatggcaggctgaggcacttacacaaaagggtgctggaggctttagggtaacacagtagaaatcatcaaagggagaatatgcggtagacaatttaggctcttcaacataacttgcttgatctccagaggccccaaactctgctcatgccaggctttgcacatgccgtttcctctgcttggactggtcttccccatcattgcctggctatcttcttctcaattactagatttcacagtaggggttccgccttcttgattcccccggcctgggttatataggtttgtcctagatagtgcggtggccccacatatgcctcctcatcaacctgttttacagttgtttatcctgttaggccataagctcagtggcaccagggaccttctctgtctctctcagcactgtattctcatcagcttggacagtgcctggcacacagtggggactcagaaaatattttcgaatgtgtcaatgagtccatgaatgaatggaatttggtaaaaaagagaattctgacctccagcttctctttatcttatgagatgctttcttcactgtaatcttgcaggactggagttaggttttatttagaaagctggcaggtttatttacaaaagatgcaaataaaccactgggcttaggggacagaaagaaagagccattttcttagactagaaaataatatggaatggattagggggcagaagaaggaatgggtgagtggggtggaggaatggcaacagataagatgttgatggttataaaaattgggaaactgtccaattctccttagtttagactttaaaaaaaatgagtaaatttcctagaagtcaagtgtagccatatgaaaatatttggactaagttaaatataattcccttggtattattgaattgcctttgacttggagacagagctattcattatagagcagtttctaagagcctgggcttcacagagattatctcttttcattcaacaatgtaatgaagtaggaattatacttctattttacagatgaagaaatagactcagagagtttaattgactttaggattgtaaaactacaaacagtagaactggcagccattcattcattccacaaatatttattggcagtattttttttttttatcattagctttgtcttttttgatggtagaaaatgcatttcatttagaactatgattttagcccagagaaagtgatgtagaaaaaagcactaagttaactagatcatatcagtataaatgtgaagcctcaccattttactcatccaaaagtgtctagggccttaagttcagttccttttattacaactttaatattttgtctgtcttaaaaaaaaaaaaaagacattaaatctccagcccctggtatcgtgcttggaacatggtgggtacttaataaataatttgtagtgaatgggaaaattgagaaccattagtcattttctattcagtattaacaaagtctgacttacttttttgtttttgttctgtgtgggcacatttcactgagtgcaacttatgaaggacctcaagatcaaattcatgtcgtactcttggaattgaattctgacaggtggactgagagttttttgtcctctaagccttcattctaagacagatgacaccaatgtaggtagttattcagaataatagactcaggaatttaataagggtgttgtttaaaacgcaaatatcaccaaccagtggtaaagcaaacacattctgtgtgaatgagtacagcccactgattgacattcaagacccattggaaaaatcaggagacacaagagtgggaagagtgcagattggagcagctatccaaaaatacagaaggccagaaggtggtgagaaaaatgtcagacaacagattgtggagaaaaataaacaagccaagaaaagtcctatttggccttaaaagaggcagatggtgacaggaagtgttcagtgaggagtgattgtgctgaaaatcacaaagtctataaaattatccatctgtagtttgaggtttttggggaaaattaaaactctttgctagcattacagggaagggtgatagcacacaaacagaatattaagtaagtgtgtatttgtgtcaggataatagaaatgagagatgcgttattccattagaatagaagttttgtttacttagagattgtgaccaaaattataaaacgtgttttgttttgcataaaagcagttgaacttgtattaaatctgttctttccacatttttgatgtaagtaagaattctcccaagaatgttaatagattgctaaggtagcaatgataattttctaactgaaggaatgtactaaacatttttttccattagagagtttttttggaatgggatatagaaaatgacaaatcacaatgctaactttaaagcaaagaattttaatttgaaagttgagaaaatatagcagggaaaactaatcatttggaatagtatgagataatttgaaaaaaatattataaatattttaagatagatgtggttgaacatttagaattgggaatcattttttgatagtttgggacctagttttctgtgcttacattttaattcagtactacttactccgtggtcttctggtggtgtgcaacttgaggaatcaaataagccagggtttttacaactcttttctaggtcattaaagcatttctgctatgtgcctgaatatgtctttgatttcatgcataagaaatattagatgcttcattctccttctttagaagaaatactaactgaatatgttggattcttctctatttttattgtttctctcttagatttttaaccacagttgctcaagtctaagttttgtattttaagtttagacgtgtaaagtaaaaggctgggagctgagtgtgtggtgatgcttcctccttttcccttgagaactgaaggcaaaaaattaaatttattataaaaatttgttttacttttaaagatgtgattttccagacagagaaacaaactcatgtatcggtgtattttttaatgaattagaagcatgaaatctaggtactttatgtaagtcattttatttaatcctcaaaataatgttttaaaatagttattattttcattctcattttataattggggaaatgtaagatcatcaaaaccaagtttcagtttcctaaagtcacacacctaatagcagagtcaggatttgaactcaattccgtgtctttcaatggcagaaggggttttgcacattagattacataagccattgtccattgactccttgtcctttgcacttgtccaagagtggtccccaggcacaaacatgcatgtgaagaaagctccagaagagattctgattcaaatctccagttgggaactaatacatcaaacatttcaaaaatcaatcaaccaaccaatcaacccagcctttattgtatggtggtatttaaaaatctaaactctattttctgcaagttgctagccaattgaaccaaacttcttcactggataatatttttaaacatagatttagaatgcctttttttcaaatatgaaaataaaagatataatagcttatttctgtgatatatgcatacataattgcttcccacctaatttttttttcacttttgtagccttatatgtgtgactgtcttaatatctcaaagggctagtgctatcctcacccttattcttagattttatctctttaattattttctttgctttgttattcccaccagtttgtcttctagaaggtcttcatatcatgttatcacttaataaacattctcttttttattctgagtgaaaatgcaccaaagtataaatctgagaaaaagtgaatgttttataacttttgtttctcagaaaattatagcagttatgttaatattggtgatatacttctcattgtagtcattcctatgctagcaatatttttattgctactgtggataaattatttcattatatttttaacttgttattgttggagtaaaacaactatttatttttcatataaatattttgtttttggcctttttgctgaactctgaattctaatggctgtccagtttgtttatttatttctttattttatcatctccattttacaggtgatgtctagtttattttttctgttttttttctgagtgtactatataaattgtatacagtgttggtactttatatttttaagtttatatatcgtaatttattcctatgcataattgaatagtagagaatttctagtatactgttacatagtatgtcttttccctgattttaatgggaatggcatttctgtgctcatatgcatagtcaagcattcaaataaccattcttctgaagttgcagattaggtactttaagcatttggaataattagtttttattaaatgtcattttgatttaagataattttttatttataggatactaaaagtaaactttggagcagatttttaaaacacacatttctactttctgacattttacttaggttttcatatgtatattcataaaggaaattggcccgtacttctctattttatataaattttatcacacttagaattagagttgtaatttattttcaggaaataatttcattatgatctacatatttgttaatgtcgtgagaaatagctcaatttgggcctgcattgtagtggaaaattatacttcttaaagctctgcctgattattagttacttccttttaactgcctaaggctgatccaatagcaagacacaaacctactgagtgtgcagtagtaaatttctcattttctgtagtaggatttggagtcttcgttgctgtgctctataggttaaaaacaacacatgtattgaaaggtatacttttaggacctacgtgcctggccatagcctggccatagctcctggtcctcctgtgggcagagaaggggccaaatcttagttggtatctcttctatgtttggtcagcaaataacctctgcctctattccacctgctggacttgacatttgtaacttttgtcttctgtgtcttgctgacagagatagggctcattcctagattggtgaattgcttgctctcctccaagttgtccaaaaaatcccgcatatttacctcacagccctgcatccttcttgttcttacagtaaggaccttgaagtttccttgccaccttcacatagtataccttttcacccaggaagggacaattggagttgtagttatagaattcttaaagtttgatttaggctaaacattgtgctcacattttcatccatcttataatgctacttaatatcatatcatgatttagaacacaaattacataaacagaaaggcatatctggatagcttgtgctcttatatgatgttcttccatttttaactaatgttaatggtgcatagcattccattttaatgcctttttctctgttgtttccattgtattgtttttaacctaattaattatttctgttttttaaaatagttttgtaagaagttagtctaggtcagcattctgcaagctgttctcagaatactaaaaaaagggcaaataagcttgggaaattgtactaaatactctccttgaggattcaaagtacatattaacataagaaaagatctgagaagttttaaaataacagggaaaacttttgaagtttattcaatgattaaaagaacttaaaaataaagaacttatttgtgtagaggaaggctttttcttggcacagttattaaaattctctggaatagattttaatttttttcttaacaccaatttaagaagtgctagtctatttcatcattatcattatcactttaaataaagagcttaggaaattacttactcaattcatcgttgttctttcatctcatttattattttttaaatatattttaattattttttatctatttaaggaatcttctctttacaataaaaaattgtttggttcctttatttttatatttaagcaggaaagcaggaaaagaattaaagttatggcattatctctgagtaaccctttgaacaatcctaaagctttttatatttagcaatctcattattgctattgcaaaccagagtatctgagataagtctcagtcaatttaggaagtttattttgccaaggttaaggatgtacctgtgacacagccttaggaggtcctgatgacatttgcacaaggtggtcagggcacagcttggttttatacattttaggaagaaatgagacgtcaatcaatatgtgtaagatgtacactggggccaggtgcggtggctcaggcctgtaatcccaacactttgggaggccgaggcgggtggatcacaaggtcaggagatagagaccatcctggccaatatggtgaaaccccgtctctattaaaaacacaaaaaattagccgggtgtggtggcgggcacctgtagtcccagctactcgggaggctgaggcaggagaatggcgtgaactcgggaggcggagcttgcagtgagccgagatggtgccactgccctccagcctgggcgacagaacgaaactctgtctcaaaaaaaaaaaaaaaaaaaaagatatacactgggttggtccagaatggagggacaactcgaagaagggaggggtgttccagataagagacaaacaaacattcttttgagtttctggtaagtctttccaaaggaagcaatcaaatatgcatttatctcagtgagcagagggatgactttgagttctgtttgtcctttgtcctcaagaaatgtccctgtggacaaattgtgagggaggtatgtagcttttttatcttagtagctatcgtttttaggaatagaatgggaggcaggtttgccctaagcagtttccaggttgacttttccttttagcttagtgattttggggtcctttcacactatttcataaataaactatttttaattttcttctttgatctcatttattttttaaaaaagttttatgcctcttttcaaagttttattaatttccagtttcatcatatggttattagagaatgtgatctatagtctttcttatttataaatttataaaatttacaaattttgtttctaaaatttatcaaaatttccctatgacaaattatgtaattagctattgtatttcatgtatatgccagaaggtgaattccctgttgctagattaccaagataaatatatgttgattcattttattttattttattttattttttattattatactttaagttttagggtacatgtgcacaatgtgcaggttagttacatatgtatacatgtgccatgctggtgcgctgcacccactaactcgtcatttagcattaggtatatctcccaatgctatccctcccccctccccccaccccacaacagtcctcagagtgtgatgttccccttcctgtgtccatatgttctcattgttcaattcccacctatgagtgagaatatgcggtgtttggttttttgttcttgcgatagtttactgagaatgatgatttccaatttcatccatgtccctacaaaggacatgaactcatcattttttaaaaaaatccctactgtccttattatgtccacttgacctgttgtaagcaggtggaggtgggttgctttcttctgtaattgtgtttgattattgcctacttagacttctaaaggtttttgccatatataacttcttgctgcatttttttttagttatttactcactagatattttgccttttcaaattatgaagtggtcctttcacctaaatactgcttaaaaaatattaaagtcaattttgcataattagcttaccttacttgttttttattttggggtttgtttgatatgcatgtacatactctgtttttttttttaagtctttccgtgtcattttatgtatatctatcagacgttgtagaattagttattttctcataatgtcttaggcttttttcttttgataggaaaatataaatgacttatattgattaccataattatcatgtttgattttattatttttatctttattttttattactgtttgctttctattctgtattttgcaataaagtccagtttttaaatttttatttatttgtatttgtatttatttatttttttgagatggagtctcgctctgtagcccaggctggagtgcagtggcaccatctcggctcactgcaagctccacctcctgggttcacgccattctcctgcctcagcctcccgagtacctgggattacaggcgcccgccaccacgcccggctaatttttttgtatttttagtagagacggggtttcaccgtgttagccaggatggtctcgatctcctgacctcgtgatccacctgcctcggcctcccaaagttctgggattacaggcgtgagccaccgcgcccggcccatgttttttactttgagtttctgtaatgatttaaaaagtagaaactttttttttttttgagacagagtctagctttgtcgcccaggctagcatgcagtgatgcgatcttggctcactgcaacctacacctccctggttcaaatgattctcccgcctcaggagagagtaatcccagagggattacagatgtgtgccaccatgcccagctaatttttgtatttttagtagagatggggtgtcatcatgttggtcagggtggtctggaactcctgacctcaagtgatctgcctgccttgacctcccaaagtgctgagattaccagtgtgagctactgtgccaggcggaaacttctttttaattccactgttgcttactataaagataatatagacttaaaacctctttattattatgaaagtgtaaatattattttaatatttgttggttttttgtatctagaagtttttactctgacttttaagctagaatatttttatcttgttaaaaaaaattactatttcttcttcactacatcttctagtttcttgaattaatttcttgagtctaatgaatttatagaactttgctcaagcaatattttggaccaatatttcctttatgtgcttacagttagacgacaaggtgaaaccagctttgcctccttcctgtttaggaaaacagaaaattctacctgcccagtttttagttggataaaaggagcaaggaataaaaaaaatattttggcaaatttactagatattgacaataaagtcaaatcatccaaagattgatgaaaatcaaatgtttaaaagcaaatatttcctcaaaaaaaaaaaaacacttaattccaatagagtcctagaagaagttttagaagtagttctcaaatgggtgagatcttgctacctaggggacatttggcttgtctggagacatttttggttgtcacaactctggggagagtagggatggaaaggcagggaggaggtgggtgctcctgacatctggtggaggccatagatgctgctaaatatcctacagtgcaccaggcagcctctcacaacaaagaatgatctggtcccaaatatcaattatgccatggttatacctgtgtagcttacatgctacctattgtgcctgaatgaattgcttacttaaagacttcagcaatacagttttctgtattgctctctctgttttggatttcagggctctcacaagctatgatcaagagtcttcagccaaattaaaataatggatcattttcccacactgaaaaatattctctaggggaatgtctttcaactctagaattttaagctctattcttagtggtttcatatctataaatactgttccttcaagaaggatatgaagcaagctttatttctgtatttctaaaaagtaaaattgaacgttagattattggaacaattatttttactgaattatagtttaaggttagcctttgttatatataatgatttattctgtttaaacaggaaaaatgttaagtccagcctccagctatggtgattaaatcatctcagttgctgtgtgacatctacttcttgtttctttccttgctatttaatacttaaagtgtggtgccccacttgtttgccaggagcagtatcacatcagactctgctgttaacaaggtccccaggtgattcatatgcacattaaagttcattttgcacctcttttggcattgactttactttcagtggcctattttatgtaatgtaaaattgtgtaggctgcctccaattattttagaagtaggaaaaggcaaatgtcttttgtgtctgtttgaagtaggctatttctggattaaagaaatacacatgcacactcaccggtttgagaaaattcagaaaagtacaaataatttgacacggttaaccctttgttacaatctcaccaatacactacaatgtagcagtctctcgtgaggtatcagccagagttttttgtctcacaaccaagaaaattaaggagcatggacacaaagggtgaggttggagcaaaagtttagtaagtgaaagaagaaagctcttcgaggcagagagcgggcctgaaagagagttgctgtttttatagttgaatgcaaaggcttttacaggaaaccagtgagggctgggagtctcatttgcataaggtgcaaatttctggtggctccaccccatcatactagtgcacatgcaggcccttagcttgagttactccatattgctttgttccctttactgtgcatgtgttagaggacggaattttccattgtgggcatatctgggaagtcagctgtgtaacctttcttatatgtgtggctgcaggcatgtcttaggcaagccccttgtgcaaaattatctgtgcctgcagcttgatttctcaggctgttcttttgattgaaagaattcaactgagaacccatcctaactggctgcctgatcagtttcttcctttctcttctctcactttagcaattacctttttgtttttttttcctgtgcatatgtctttgtataaattataattttgtccaacctttttttaaacattttgtcataaacatttcctgaaccattttctataaacattttctcaaccattttctataggtatttgtaggtaatatcaatggttgtataatattccattttatggacatggcataatttattaaatcactttatagggtataatttctgaattaaaaagaaaattaatatgggcattgggtaagaacctacacatattttgcatttttttcctgaatattagatcctctaaaggagattgtcttccatagcaagtacagaactccctgtctatgatggtttatcccccaaggctctgacggaagtattccattgtatcactcacacaaaacaaaagtggatataatacttctcaatattttccattggatctcctctagcaatagggaagggtgatttagaatctctgtgaatctcaggctgtagtccaaagcacccatacgttgcacatttgatatttaatttagatgtaatttcttcttgaaaaaaatgtgaatttgtattgcattctgtaatgtataaataatgttgtttattacttatgagtgaaatggacactatctttaagttctatttcagattatgcatttttatgctgtattttcatctctctctctctctctttctttcctcttttatttcttttttatagacaagcttttgctctgtcacccagtctgcagtggagttgtgagagcatagctcactgcagcctcaaacttctaggctcaagacatcctcctgccttagcctcctgagtagctgggactatatagacacatgctgctatgcctgactaattttaattttttaaatgttaatttttaaacttttttcattttttgtaggggtctcactttgttgactcatctcaaactcctgggctcaagcaatcctcagcatcccaaagtgttgggattataggcatgagccattgtgcctggctgtcctgtattttcttaaactccttgtcaaggtttaagtactccaatatagaagcaaccaaataattgaattgttgctcaaagaaaaaagacttactgtaatgggagataattttccctttgacatcacagcataaagacaacttggtctcccatatacatgtattacccatggtattagtttcctgtggattctgtaacaaattaccacaaatttggttgtttaaaacaacggaaatttatcctttgcaattctagagaccggaagtttgaaattagtatcactggactgaaataaaggagttgtcagggctgctgttccatcagagtctctaagggagaattccttcctttccttttccagctcctggtgggtgccagcattccttgacttgtggctacatcactccaatttctgcctttgtggacacattgtattctctttttctgtgcttgtaatctccctcttacaaggataggtgtgattgcatttagagctcacccaggtaatccagaataacttccctattgcaagatcattcatttaatcacatctgcaaagattctattgtttctgccatataaggtaacattcacaggtttcagggattagggcatggatatctgttgagaggccattttttcagcctaccacactaatctttactctttctgttaatcaattgtgtcactctcctgtcctgtgttacttatctattgccacatatttaaccacccctgcaactcagtggcttaataacaatcatcatttgatttttttcataactctgttggtcagcaatttgggttgggctcagctggaaagttcttcagcaagtcttttctgaattcacttagaagctgcctggttcaagcaggagcttcacttacgtctgactgttggtactagttgtcagccaggccatgtggactcggagttatgattctttgggggcaattaggttaacaattttctgtgtctcctatttttaataattttggaaatccaagtttatacaaaaacattcccacttattggaaaaattctttgcttttttaaacatactttaaaaattattgctgggtgcggtggctcacacctgtaatcccagcactttgggaggccaacacgagtagattgcttgagcccaggagtttgagaccagcctgggcaacatggtgaaaccctgtctctacaaaaatacaagaattgggcaggcatggtggtgggcacctgtagtcccagcgactccagaggctgaagtgggagaattgcttgagcccaggaagtggaggatgcaatgaatcgagatcgtgcctctgcactccagcttgggtgacagagtgagaccctgtttaaaaaaaaaaaaagttactaagcttctgtcatgttacaaacacttcaagtttataggaaagatgaaatacacatacacataatgtaaaaacaataataagcaaccaagactgattataagaaattatgtcattgtttatgctgtgcttgtgctttttgggtttttaaaaatgctgtatagatgactaacaggtaagaaacatcttattcttaatacctaatccctaaggaaatcataacctcatttggcatgaggccagccctaatcatgttgggagaaattctgcaggtaattttcatgtacctagagaatttctgattatttgaaagctgaatggaaatatcaaaaaataaaaataaaaataatgcccttattattattgtgctctttaaaacgaattgattgtagtctttttgaaaatcagtttttagtagctgcagaaatcatatagcctagaggcagttttcattttttaaaaaatattgcttgtaagtaaccatacgtagccaaattgattgcatatgttgactcaatttttggaagaagtaatcttagtcatacatactacaggaccttcttgttctctgagaaaaatgtcactttgggaaatttgcacaaaaaattttcaaagtagtgcaaaacaacatatgacaaaataacataaaattttttgagttgagtttccaaatgtaagtgcttgtgtgggatttcagaatgatgtttatacatatattctgcaagatcccatttcactgacattttattggtaatagatgaaaagttttattaattaaaatttgagttttaccatatctgacatgaatcccaaaaagaagataataaggactttcaaaaatttataatataattgattgttaaaattgtgtggtggtaacatatagtttgcacttcatgttggaatttgaaaaaatataaatcaatatgaaagtaatttttattatacttaatatatgcctcataaaagaaatgcaaaaagaaaattatttaaggatatacatttcagacctactaaaagagagtgaaatttagggtgacaaagctgtacttcaggaaaagaaaaaaaatgagacaatgatttaagttaaatgtttgaatttagacaccaaggttgaagaatgctggcacagtccagaggaaatgaatgatggaatgggactctggacaaggcctctgccaccacctcagtattactgaccttacctttccaggagaagctctgacctcggtggttgctcatgaccagatttctgctcttgtcttttccaataaactcgtctcacctggatggagactttgtgatcatacctaagacagttcttcagcagcctgagccccattcctagagactttccaatgtgtcctctgccttttgcctttcttatcatagatctcctgatactgacctataagctgcattttactaaggttcaggagctgtgtggtttgagttaccttcacacctatcactgcctgtgctggtaaggcttcctgtcttaatgtgatacctccgttttccactgtccacacgtacgtgatgccacctgggttagcctggcatttgtttttacatctgctttctcccactccagctataggttaggtgtgttagtactacaaaattgatcttgcgaaaaaggcgaaaggaccggcagaactgacgtccttttgtacatgagaggaaaggagaaagggagagagggcagaaattatgtttagggcacaaactatgtttagggcactaggccaggtagtttccatatagactctcactttatatagctctctaggaagcaggtgtgaatagctcccttaagtaaggacacatagttaataatagggggagattttctgaaaaagaccaggcattttccaccacaacttgctgcttcctgatgagtttggaacatccccagtggacagattctggttttttctgtatatattatataatcatggtaattgaaattaagtactgaagaacttttggaactttttggcagagatatctgaaagctgatttgatttttgttgaagtatgaagacagtaaaatatggtaaagtgtgataaggagccacagagtaataaaaatagctaaatgtatgagaaaagatctgaagggaaggaagaatattaaaggctttacagaataaagcagacattcctatgtgtgttaatagagaacataggtaacaagacaagagagatgagtgtagtagatgggaaaacaaaaacatctctttcttttcctcttaccccaccctacaccccaattaaaaaaaaaacccaccaccaaatgaaacaatccatgtaagacaagcaatattaagactatcagtatgatgccagagaaaaagaaggtcggggaagacaaagacactcccaaaacatatttcaagtactcagaaaatgaaaagctgatgggtgaagcaagacctatttgcccttgtctctcttcataccatgttttgtgagcatagctacattcttgccattgtgccgggcactgatgacggatgtgctaggcaagaagacactgcacaaagagctgaaaagaattgcaggattttaaaatcatttttgtgtgtgtgtgtgagacagggtcttgctctgttgcccaggctggagtgcagtggcacaatctcagctcaccgtagcctccacctcccaggctcaaataatcctcccacctcagcctccccattagctgggactacaggtgtgtgccaccatgcctggctaagttttttaatttttttgtagagatggcgtttcactattgcccaggctggtttcgaactcctgggctcaagcaattctcctgccttggcctcccaaagtgctgggattatagacatgagccaccatgcctggtgaattaaataatttttaataaaacttttcaatagtcacaacaatttcagagagtagcgtaagaatgtgagtatcctccttttccctcagtaatttatatgtttcagacggattattcatattcatctcaaagttcagggcccattcctgatctgcccccactctctctgttcatctttgtttccatgtggcctaaacagcgcaacccgcccccagctgctcctaccagagacctgggagttattccaggtgcctccttatcccttcctccagccctcaccaagcactgtcaattccacgtcttcgttgttcttgaatctgttcactgctttccacgacctccaccgccaacctagtccaagccaacagcctcttttgcctggatttgtccaaagacaaaattacaacaaatttagtttaaagctctccattggctttattgcaattctagaatcaggtgacacttcatcccataaaatagaataagtgtttcaatgactctagcagaggaggttggctctagagacagaaaaagggctgaagaaagaacaaaagtggattggttatttcaaagttactttccttgttaggcagagacagggagacagaggaatagaaaggtaatggattggttaaggactaaaagtgaggaacttaattttcatacttactggcctgtttggaaaattggcttttatctctctcctgatttctcggaaggtcagatgacttagttttagtttggtgacatggaactcagaacaagtgactccattttgatttttagcctggtctctcggagctcaaggcaggaacttagtccaaaataatggcctcctatagtgattactgaacagactaccacaatatcctctgacttcttttccttattatcctctcagcccctccaattcattctccgcaccaggtgtgggcaaactttttctacaaagggccagaaaataaatattttcagccctgccggccatacggtctctgtctgtgtcaactactcaatgctgccatttataggagaaagcagccatagccagtgcataaagaaacaggcgtggcggcatgcaagtaaaaccttatttacacaacagaccgcagcaggatttggtgttctcatcactgtttgctgagagtccttggtctacactgaagctagggatccttcttaaatgcagaggatatcctgtcaggcccctgcctaatgttatttaattgacttgctgctgctcaaggacatgcattcacaatgtcttgcttcttaaccttgcttattttgagccccttccttcttgctcattttgtacctgttctttggctttctttcgttcagatccttgaaagctcctttctgagctaggacctttgcacgagctgttttacggttccctggaaatcttgactttcctaacccctgctcaaccttctgtctttagcttaaatgttaccttctcagggaaaccttccttgtctttccagactgatttagtttttttctactagatccatacttttttttcatttatctcaactttttaaaattaaataaaaatctttgtgtgactgtctagcatttagctccttgctaaactgtcaactcccagggtcagggaacatgtgggagttttcaactccgaattctcaacattttgtctagtgctttgtatagtgggcacttagcaaatatttgctaaaaaaaatacatttaaatctataattttcatctataatgtgaacattgatattggagaaatgggtgcaagttggcaagccaaggtgaaatagcgatgttatagtgttcacctatcagctatagagagcacacagattttgcaagaaaagcttttaggttgaaccacatgaaactacctatatctgactactcttgacctacagaaaaggtcatttcatgtgccttaatgtaatactaaatattatatactctttttcttttggcatcttactttcagcacctaaagaactcggtggaacgatgagcactaatatggcacctggcacattgagcactgtatttaataagcttttgatggatatgaggttctggaagtaagaaagagggaagctgccagtgtgaagggtatatgcaggaagaggagctaccacaatacctggtagttgagtgcgtgataacacaacatctgccatagcttggtttgtttgacccctccaaatctcatgttgaaatttgacccttagtgttggagatggggcctaatgggaggtgtttatgtcatgggggcagatccctggtgaatgtcttagtgccatccttactgtaatgagtgagttttgctcttagtcccctcaaaacctgttgttaaaaaaaagcctggcacctcccttcttttgctctggctttctctctcaccatatgatctctgcacatgctggctcccctcaccttctgccatgagtggaagcagcctgaagccctcaccagaagcagatgctggtggcatgcttcttgtgcagcctgcaaaaccatgagctgaataaacctcttgtctttatgaattacccagcctcaagtattcctttatagcaacacaaatggactaagataacatctttgaagctagtttgccaaagttataggaaaaaagatggaaaagcaagagtctcaaataagttatacagcctcaatgaaatgataaaggaccatgactttgcatataatggctttctgagaaagttgaaatgctaatgcctttcaggctacagaaaaactgactttggaaaagaattcagagaagcaaaagaagaagagatgaaagcttgagtttgtgtttataagagcagatatgtaaccaatttattagtggaacatgttatgggttattatatcataggaaaataattataaatatgatgtaaaatattaattcctgaaagttttggaaagtaaaatagaattttttctgtgtaataagttagtataattcttagccaggatatgaggactatgacctcttatgtgcttttgtagttctgtgattccataaaagatgtagaagggaagtaaaaaataacattacacataaatttgaacatgttttgtttatcgtatataataatacgtgtgctgacatttatttactttatgtttcttgtacattttaaatatcaatccatgccattttatagcaaaatctttgattcttcacttcctgttgtgaatcagttccaagaaggctttaccctatcactccattaaagactataatcttcatcactgtttagatcaccagtggccaccttctggctaaatacagtagtaattggacacacagttgaccctacggaccatgctttccttcatagaacactttttaacctggttgccagggcttggtttcttggttctcttcctacctctgggctgattcttctttgccatctttgatagtttctcctcaacttcccaaactcaaatatttagaaaccctagcactctgttcttgaccttcctctcttctttgcatacatttattaggtttatgactttcaaacttattttgatccctacatataaaaaatatattttgcagcatttcccagcacacatacacacacacacacacacacacacgtgtgcacagaatccaagttctcttttctatatcattaaaaaatcctctttatacccactaaattgattttactacccacttagtgagtcatgacttgcagttggaaaaacatttttctaggtgatctcatataatctcatggctttagatgctgcatttattctgatggtacctaaatatataggcatgacagtgtgggatagtaaaaatgtgcattgcatagaaaccatacagcatgatctatgtaatcaatggggaaagttatgattgtttcctgatctttacaactagaaaaaatattaaaaactcatactattgtatggctgtgttccaataaaactttatttacaaaaaacaggtggccagcccatacactgcagtttgctgaaccatgatctagactattccaaaaactttttggaagaatcatttctggatcatcttagacagaaaaatctttttaattatttagagatgggctcttgctatattgcccaggtttgtcttaaactcctgggctcaagtgatcctcctgccccagcctcctgtgtagctgagactgcaggcatgtgccaatgtgcctaactgaagaaaaatagttttaaaataaatcttttctttaaggaaaaagcttttgtagagtcgaagaggaaaagcttctactttgccctctaaaggtttaccgaaaaccactgaacaaaaggcagattactaagaaaaaaaggcatgcaaaatttatttaatgtgcataagcacaggagacttggaggattacccagtgaagtctaggtgcttatatatccttcttcatagggaagtgtgaaagtgagatcctggggaactagtcatgaggactgctgttctctatgttgtctcctttctcagacaggtccttctctcagaagaataaattcccacaaaagtccttaattgagtgttattggtctggctggggtcacatgctcatatctgaaacagttgctgaggtcagagatgaagaatagtgattctaagccctgggtcagatggactgagagtgaagaagaaaatcatgatgccgtgcctcaacgcaggagaaattaattctggtccagcaaaagcttcacatgtcccctctggacaccatttaagtaatattttcagcatattttttcagagcctgcatcctgtattaaatcagctctgttctgtcattgtcccagatcctgtatctgcaactgagtttcttgttgtcaaagggaatggaagttgaaaggggattaaagtgaaaccctttgggtcaaacacttattaaacagcagctcaggcagtctgccagatcctgaagagataaagatgaagagggaaggcacagttgtggctcttgagatcattatatctaatgacctcaattagatataatgaaatgaggacatataaatatgcaaattcaggacaatataatatttgctatgatatcctcatgcattgggtatgatgggaggaaagacagtcagccaatctgggagcaatctgggagcagagtgtggggtgtggagagaattcagggaaggtgttctagaggagctaacatctgagctgaatcttgaagtatgagtaagagtttctggatgtagaaggggaggcatctaggcagaaggaacagaatgaacgcacatatggagaggagacagagcatggtgtgtgacgagctgctgataatttaacattgcttcaggatgaggtgtgaatcagaaagtgtctggaggggtggaagagactagatgttggcactcaacataagttgcctagtgtttagattaagttcagatatgaatgaatttagactttatcctgtgagaattaaggagatcttgaaggcgcttacttaggggaaggatatctgtggatgaatattttagaaaaatcactctggcgattgtgtggaggaggcaagatcagttctggaggtgggaggacagacagtttaggagactattttaacagacccagtgggagatgatgagggtagtggatgggagaatgttcagaagggaatgagtatgagcaatattggcgaagtttgataaatggagttatgtgagggagttgttttgcagcacggggctttcctggatatgagtcctcaggttaggaaggccattttggtctagagaaagtgacaggtatatttggtagtacaaaaaagcctttgaggaaagagtaggggaaacaattggtcatctatccttctttatttgaggcacaatttccccctccattggtgtattttatcaacatgtattcattgagaatctcctatatgattgtcactgtgctgagattctaactatgaacaaagcgatcataacccttgctcctgggtcctacagtttagtgggaaagacaaatggataatttgaatgggtcatttcaaacacgatgagtgttacaaagtcactaaaattaacatggttttaaaaagatgaaacagatctaatgcagtggaagagttcatcgtgacttccaggctagtgggtagtaaggattgtaaaggctaatgccagcttctttgactggggcaatactttatatggactgattttggatttcttggcactcatggactgtagagtttgtagtagagtttcaagagtgcttgcgcaaaggatgtgcacggatggcaaaaatcagaggtagagatgcatagttcacctctagttctaaggctggcccctttaatattgggcaggccagtagaaatgcagatttggtgcaaagcttcatatctgtcctggtgttttaaaagagtaagtgtttccaaaggtgtctgattttcagtcaggaagaagcttaaaccttcagagattctgtctcttataattctgacttagaaaaaagggaataatgagaaacacttcatttgccttgttcattgaagatgcttttggataaataatctagcatcatgtttgaaaaaccgaccaaccaaccaaccaaaccaatgttaacaagaacaatagcaaaacaagaataacaacgtaaaaagcagttgtctaataattcccaaaaggtggccttgggttgagccaactttaaaattttagtaaggcagcaaaaagatcacgtgaaagagaaatggataaggtagaagaagatggtggggagggggaatagaattaactgtgaaaggagagtagactgtgtctttattgttggtcattctgatttataagtcaacagaaattcatttcctagttaaattgttagaaataaattattcatggaagagccatctgtgttctctattgccaatttctccacataaaaggaacaatgtgttgtggcagaagtcggctgaagcttttttttttttaatgtgactcatgtcactttgaagatttactttactttcaaacttatatctcagttctcagtgtgacaggaggttcatgttacatttcttcctcttacaaaaaatccagagagacttctaatcaaagaattatattgatactaatgagaaaatatatatttacggttgctgctagacatttctatatataaaagataggggcagcagactgattggaagaggggagcagtttacaacaaatagagcaaatgtcaacattctggataaaatcatgttgaggcaatcaaggaaccgatagcatgatgagagggctaaagcactccccagatcagctcgtgagcccattaaatgaacaaaatgcaattcccttgtttatgaagtttatttctctgttttctataattttttgtttagcttttaataccttagctcaaagatcatcatttgcatagtgcaattatattgttacatagctttgcattagatatccatatcagcctttcttgccttcttcagtttttcctactataaacattgtgcatgtgtgtgtgtttttctgtttttactctctgtgtatcctttctaggttcccaacatgccgctcctgctgtgaaggctttaaccagaaaaactcctaatgttcttctgccagggatatatcagtgggaggcaggaagaatggtggttttaaagttcatcttcattattatagaaaataactttggctctttacttatctagaagttagatcagtttgaactgagccccttgtaatatagatgttggcaatatggaagtgtaccaaagtattcatttgcagagaaattaatcaaagataagtttcagaatccccttagctgctgctgctgctctcacaaccccacccccccccacacacacaagctgtggtttctggaacagtggtctggtgtgcaggatttggaaaaatgccactgatttcatgattcatatgcacaccatggaaataaacaagagcaaacttctataataatttaggtactttaagtcttatccactttgtgggattttttcctcgtaccttcccaactgagttcctgtagccctatataaacattagcatcattgctgggagaattccaaggagtgagtcagaaaataccacctctgcccctatgtcaccgatttggaaatatttgccttgaggggttgtcctcagtgacttctgagtccttgatagacactaactaattagcacttgaaaactgcctccgagacctggaacttgttggttgccagagaggctggtgtgctccttctttcatgtgcagcattagcaaatgccggtgtggtatgaatcttaaaaattcagctctgacaatctaatctcaataatgaaagtataaaaacgctattgcatcaatggaaatgcagatgtcactgggtggcaaatgcatcagtacaaaggcacatccaaagggaggcaaagtcggagacgtgcaggtgctgagttagatcttgactgcacacctggacctttacagcagtattcccagggggtgaccacatgtttgggtttgctcaggatggccccatttatgactgtttccctggcagaattaatcgtcgagaccccgttcactctcaagaatcttgatttgattgttaatctgatgaacagtgaaagtgttttcaatggctcaaatagcataaagaaacccagagtatctggagaatgaagcaatttgaggaagtggctcctatagatcctgaactccttaacaggccagattaatagcacttggtggaccttggctttcctgtgacatagtacgtcccagtgactccatttgctacagagtggagccatcatttgaatttccatcacggcctgtctctggagcagaccactgtggtactggggttttgggggctctctcaagccagcttcatagactcgctaaccttattttacaagtagcattctagaaccagtcattataactttcagggtgggcattttccacgagatcctggttccaattacgcctaattatttgttatgtcctatttgggttttctttttacagatctttaagaaattttcctttggctctgagttgagtcaaaatgttgagttcaactttcatcctaagcaagatagagggcatgaattatggttgaggacttatgcatattttgaccaaatgaaaatgaccactgttgctccagcccaattgctgctactctagattgtgaatgcagatatagtcaaaatgactttggtaaatgcttctaatcatgactgattatctttttggctggtagaggaagtaggaatgcattcatattttgtatgaaaggtagcgttctttttgtaaattcttgctatttaaataactttttgggtttgtcaaaaccttttcaaatttttccagttaaagtttcttcctacagcaagacggtgagtttgttttttttttttgttttttttttgtttttttttttttgagacagggtctagctctgtcacccaggctggagtgcaggagtgtgatcatggctgactgcagccttgaacttctgggctcaagcaatcctcccaccttggcctcctgagtagctgggactacaggtggatgctaccatgcccagctaattttgtaattcttttgtacagacagagtcttgcgatgttgcccaggctagtcttgaactcctcggttcaagtgatcctcctgcctcagcctctcaaagtgttgggattacaggcatgaaccactgtacccagcctagcaaaacattgagtttttataccaaaaatatacagcagctcgtgctagtgtatccacagtactacttccatatttccttctgatattcctcaaacttatcttcttgagatgggaataaactcaacatacaggaagttcatacaaaagtgctaaattcagtttccagattataacaaggccccataaacatcaaaacatcagaggttgatctgtgctgttcaatatgctacccacatatagctatttaaatttaaattaattaaaattaagaataaataaaaatccagttcctcagttgcactagccacatttcaagtgctcaaatgttatttcccgggacagtacagagagagaaaattgccaccactgcagaaagttctactggagagtaatggtgtaggaacaggcagaccttatataaaacaatccttttattttctggtgaaaatggaattgagccaacctttcatgcgttcctagttctgattctgtgccattaagtcagagcactatgagaatccctatattaccttgaggaagaacagtgaaaatttacagtgctgcagctgtcccagaattcagaacccatgatctaggagactttagatttcatgaaagtaaggtctaagcttaccctgtttttcactgcaatcccagggtctggcacatagtagactttcaataaacacttgtgtaatgaatagttgagggaacccagcaaggacccattaaaagggcctaactacaaaaacacgggcatctcttggggtttggatcatttttgagggttccctgggaatcatgcgaaggggcaggcagtagccattggagatttctcctttgtagaagccacagcacagcatagggcaaatggcatttgctgagtagcttctcctttttcttctctttcttctctgtctcctctccttctcatctccctattccaacatcctatcaaattgctaattctgtggagcatttattaaatgccagccactattctaaggtcctttaatagattatttcatcttcccagtgattctattgtattgctttgctaaggccaccataacaaaataccacagactgggtagctttaaccacaaacatttattttttcacagttctggagactggaagtctgagatcaaaggcaggcaggtttgttttctcctgaggcctctctccttggcttgcagatggccgcctcctcactgtatcctcacatggccctttctgtgtatctgcatcactagtgtctctttctgtgtccaattttctcttcttataaggacaccagtcaggttggattaggtgcatcccaatagcctcattttaacttaactgcctatgtaaaggccttatcttcaaatacagtcacatgctgaggtactgggggataaggctttgctatggtctgaatgtttgtgttctcccaaaagtaatttgttgaaaacctaattgccaatgtgatggcatgaggggaagggcctttgggaggtgatttgtacatgatggctgaatccttatgaatgggattagtgcccttacaatgagaccccagagagttgccttttccatcacatgaggacacagccagaaggtaccatctacgaaccataaagggggcctttagcaaacgccggctctgccagtgccttgaccttggccatcctagcattctgaactgtgagaaattcatttctcttatttatcagttacgcagtttatggtgtttgttgtaacagcctgaatggaccaagccaggcgtcaacatatgaattttgagggtgcacgatttagcccgtaacacctataaagtcggtgttattattagtcccacattatagtagaggaaactgaggcatggagtaaccttgcccaaagtttaacagctggtaaatgatgtaacacagatagacatctcaccagtctgacttcaaagcttgcatttttaaccattagaaggggtactgcattttcttaaattggcaacacatttgggtttgaaactaattagaaaaagatatcattgaccaggcgcagtggctcacgcctgtaatcctaacactttgggaggccaaggcaggcgaattgcctgagctcaggcattcgagaccagcctgggcaacatgatgaaaccacatctctactgaaaaaaaaaaattaaaaaagaaaagaaaaagatatcaccatgagaggtagatcattgcagcattggaggtgatctgcctccccaggtggggagactgtgtacagctattgctgccccagcttctgccgttcttcatatgcttgtcaactgcactgtctccaaagttcctaccagctcagccatattcttcctccctgccctcaatgcgtcttccccagttttatctgggagtgaaacttgtggtggttagagagattcatcttgggctgtggcaatcttcagttgcacaaaccgtgtgaattacaggatggccggagcaactgaagggccagatccctagtcattgcaagtcggatagctttctctctagttactttgttttgtaatactaataagaataaaaattattttaacttcttccatatgtattattccattctctttcttcttattttatttttttaaattttttttgagatggagtcttgctctgtcacctaagctggagtgcagtggcacgaacttggcttactgcaacctctgcctcctgggttcaagccattctcctgcctcagcctcccaggtagctaggattacaggcatgcaccaccacacttggctaatttttgtatttttatagacacgaggttttgccctgttggctgggctggtctcgaactcatgacctcatgtgatctgcccgcctcgaactcccaaagtgctgggtgtacatgtgtgagctattctctttcttctaaaaatatgtaaatttattttccctttttttgttttttttttcttttaggcacagcagaatttattctactttattggtatttttttgttttattggtgttatttatccttcataccgcatatttaattgttttttaaaatactaatttcgcttttagcttttaaaatttctactcctaccttcttttggctggttttggtattttctttgaatttgaaaaaatgaaagaaatgacaaagaaagttaacagcttttaaaaataatggcaataacaagttagatacagaagtagaaaaatgttcttttcacaattgtatagccaggaatagatttaacaaaaaaggtgcaactcccacatgaagaaagatgtacttattgacaggacttgaataaatacaaattaaattcacaagaagatgtaaaatcatgaaaataacagttcttccaaaattaatatttgacttaataaaattccaaccagaattttatttttttaagcaaaaatattattttcggttcatttgaaataataaatgttttagaattccagaaaatatgttagaaaagagacttatattggagcactagtcctactggctattaatacatggttctaagattcttttagcaaaacagcttgatatgaagtctggaaaaaagcagctattataatagaataaagtccagaaatagattaaagtatagatggaaacctaatttatgataaaggtagaatttaaattcagagggaaaacgatgttggtgtaattggcttctaggtagaataagataaaatgaaaccacaaattcacaccatgtatatataaaatatacatgtgaggtggaataaatactgaaatgtcaaaatcagaatataaaataatagaagaaaaattttgattatatttagtttttctttaaaaacaggaaaaatccataagccatttaagaagagttggatagttttcactaacaaaattataaatttctgtgttgaaaaatgcacaacataaagtaagaaatacaagtttagactgagaaaatatttccaatactgcattataaacaaaagtgtaatgtacttatacaatgagacttaataaagcattaagaaacatagaaacaacaggcaaagcataagatttggcaagatacattggatggaatgcagatggccaataaatgtatgaaaaatgtttaactttttaaataaaagaaatacaaattagagtttttgttttgctttgttttgtttgttttgagacagggtcttgctctgtcacccaggttggagtgcagtggcgtgatcacgactcctgaactcaagtgatccacctgcctcagcctcccaaagtgctgggattacaggcatgagccactgcgcccggcctagagttattttctaatagtttggaaaaaataataatttttattgctggccttagaatgagtaaacaaaccctttcacacattacgaaggggggtgtgaattgctacaattgttttgggaaaagctattgaaatataaaattcatattctcctcaaatcaacaacactgctgttagaaatcttacctactgaaatgaaagcacaagtatgtattgataaacaaattatgcaaaacttaacaatggagatatgttttgagaaattagttgttagatgattttgtcattgaatgaacatcagactatatggtagagcctactacacatgtaggttatgtggtatagcctattgctcctaggctacaaacccgtctggcatattactgtactgaacactgtcatacattggtaagcatttgtatatctaaatatagaaaaggtacaataaaaatacagcatgaaagattaaaaatggtacacctgtatagggcacttaccatgactgtaggactgaaagttgctctgggtgagttagtgagtgctgaatgaatgtgacggcctaggacatgaccatttaaaactgtaaaccttattaacactggatactttggttacacaaaatttattaagaaatatttttatggccaggagtggtggctcacacctgtaatcccagcactttgggagaccgaggcgggcagattacctgaggtcaggatttcaagaccagcctggccaacatggcgaaaccccgtctctactaaaaatacaaaaattagccaggcgtggtggcgcatgcctgtaatcccagctacttgggaggctgaggcaggagaatcacttgaatccaggaggcagaggttgaggtgagctgagatcacgccactgcactccagcctgggcgacagagggagactctgtctttaaaaaaaaaaaaagaaaagaaaagaaaagaaaagaaatatctttattttttcagtaacaaattaaccttagcttacagtaactttttttacattataaatttaaaattttttgactcttttgtaatcacacagcttaaaacacagaagcattctatagctgtacaaaaatcttttctttctcttatatcctattctataagcctttttgtattttaaaaatttttgtatttttctactttttaaattctttttttaaaaaaacaaggacacaaacacacagattaacctaggcctacacagggtcaggaacatcaaaacataggccctaggcaatgggaaatcttcagatccattataatcttatgggattgcagtcatatgtggggttaatcattgactagaatgtcattatatggcctatgactgtacattgattttactaaatatatgcatgtatatatacatatgtacatatccacaaggatgtttattgccttttcagaaggttcatcaataggagagaggtaaaaattattgtgtatttataaaaggaattgttacccactattataaagaataagatctaagtgtgttgacctatagaggggtagagagaggaaaggagattatgaacttttcaaaaataaaacttcagataattttgtttgtcacaggagaatgcattacttttcatattaattataataatggttaccacttattgaccgttacgatggaccaagtgtagcgggaatttaaatatatcatttataattctcacaagaacatgcaagaacaatgtcttcagttacctatggggaactgaggctcagattggcagtcaagtggtggagccaggattcagcccctagcccatctgctgagaaagtctttgctctttcttctggttcctaccatggctgcatcatcttctgtgtgggccctaacggggagcaggaaatgccccacttctctctgggcatgggagccataagaaggaggtccctaacatgtacaaccactgctggttttggtcctggggagaactaataaagaataaagcaaaaaaaaaacccttcttttatcattgcgagcattgtcaccagtcctaactgaccactccactctaccacacccatagcaatgggctgccttactgtgtcatttttgatcgtcagtccactatccagtgaattattgcatattcataagctagaatgtggacagtcagggaaggccagcatggaagaggtaaacacctgaaacttgattatggagacagagtcagagggtagtgatgttctttggttgtggtgctacatcgtgggttgctgagttccagtactgctgtgaataagctctgtggtataggggaagatatttaaactcctgatgccctaggttttctcatctgtaaaacgcagatgaaaagagttcctacttcttagcgtgtgtttgtgtgcacacaggcacatgcacctgtgtgtatttgagtgtatattaaatgaattaatacacagcccttggaaaagtccccaccacagggtaagcccaaaagtacatgaaggccattattatgattatcaagaccaatcctcagattctaggtctaataagatagtttacttttggcatgattagcctatgattaccaatgtcataatgctaatgcctgcatttataccatgagtttaaagaaggataagatcaggtcgaggttaataaccatttgaattctgacatgtttgtgacacaataatgttcacgggtgacaccaaaaatgttgaattataatttgctttcttgaatcccggtttattttaggaggggcctaattttttgtgtgactcctgttaattttcatgactgtccttgttgctctgttgtctgtgtcttttcctgtcttggatgttggggagatgagcgatatgtagataggagaggtgagtgtgagggcagaagtgtggttggttgagtgttgaagagagagtaacagacccgtaaagaaaaccacagtatttcctacccttgatgctgagatatgcgatgaatatatctatctgttgatagagctgtttaggtttttgtttatttgtttgggtttcgtgcaatttcatgtaaaatttttctggtaattttttgttatttaattatcttcccagaagagaaattcttttttttttctgggtttggggcacattgctttatctttttctgagttgttaagcagttagaaaattattttaaatagattttttttgatacacttgatgatttttatcagtaaacttgaaaacggctgtttattttggtcacaaagaaatattttaataatgcttttgacaagatatctcaaaccatctgaatagagaatcttaaatagctttaaaagaatcatgaacttattagcaaaaataatgaagttcagtataacatttaagttgacattttgagatagtagataaagtttacttgggacacacatgaaattaaaggtgattcgttagtgtttagtaactgtctttatttcttcatttttttgttttatattttatttagcaaaacatcttaatattatttttagtttggagtgtttgtagaatatttaaataaacattaaaaaattcctaagggaagggacaggtgaaatactaatacaaacaaaaactgttacaaaatcagaaatgtcaagattttggggggctactgtgtatctgtttatctacttgatcttatatgcgattttgtctttcatttcattactcttcttcattgggaagaaaaaatcctctcaaggtcctatctcagtccctgaagaaataaataaaaaagagtagcagaagatggatgagattgagtgggaggtaaaattagaatggttgcaatcagtaaaaatcttgaaagtactttagtgagagaaccataaacaaaatatgatagtgcatatcctataagatccatgattactcataatttattcacaagtacattaaaaatgtaaaaccatgcataattatttaatgtataattaaaatttaaatattgaatttgaaactgggacaagcaatacgctttcctgtcatctgaacagttctggagtatcataggattatttcatgtctgataatattccatcatcttcctgtatctaacatcagatttaatacacacagcaggtactttttgatcatacagtttagcatttataatgaatcttggagctgaagccatatagcagccttgaaaattatgctgtatgcctttgaatgcgtgggcactcaagtaggttggagtaagaaaaagcactcaagtttttgttgttgttgttgtctttaattattttaaaagtcagtctcatttgatctctctttctttcccccactcttgattttggaggttccaaatggcctttctccactcaaagagtggttcttaggcctgcaggatagcatggtccactgacaagccgcatggcatcccaggggagcttattagagctacaggctctcaggccccactccagatctgccgaattggaatctgcattttaataggatcttccgttgcttcacgtgacatccaaatttgaggagccctgccatatgggataggtctgaatcaggccgatgttattgtctatattcctggaaggattgcttaattttccaaacttgtttgggttctgtagctttttgaatgatcccagggacgcctgatattcctgttggaagtttctaagtctccaacagggaagatcatctatattattattaccagtatgagtaacaacaatgggtgatatgatttccatttattagctacccactagtggagcatgatgcaaaatgtctcatctgtgtatttcacctgtaatcctctcaacaactcagcagaagaggttttattattatttatttatttatttatttatttacttgagacagagtctcgctccgttgcccaggctggagtgcagtggtgcgatctctgttcactgcaacctccacctcccaggttcaagtgattctcctgcctcagcctcctgagtagctgggattacaggcacatgccaccacggctggctaatttttgaatttttagtacagacggggtttcaccatgttggtcaggctggtctcaaactcctgaccttgtgatccacccgcctcggcctcccaaagtgctgggattacagtcgtgagccactgtgctcggcccagaagaggttttaagaagacaatttacagaaaagaaaaccgaggctaggggttattgttcaaggttaaatatacaatgttagttctgaaatcaaacccaagtttgtctcccctaagccacgtaccgcccccccaacccccgttttttttttcgttttttttaaacaatactatattgctacatgccactttggtcctcttgcagtaaggaagggcatataaaagtgccctgtttgtctgggatcagaaaacaagcctgtgtaggcccagagagacaaatatggcttgttgtcacatgtgtgcaagagctaaagtggatctcacagaaggagagggcagaatgatagatactagaggttgggaagggaaggtgagaatgaggagaagttagttaatggacacagttagctagaagaaataagttctaatattcaacactaccgtcggtaaattatatgtaataatttattgtgcatttcaaaatagctagaagagaagaattgcaatgtttccagcacaaagaaaagataaatgtttgaggtgatggatatcctagttacccaaattcgatcattgcatattgtatacatgtatcaaaatatcacatgtatgtataattatatatttatgtacaactatgatataccattaaaaaaagaaaataaacctgtgtataggcatatgctgatatttattgtgactcttatttctgttttctgattctgacttataaatgtctagaataaggttctttaaatttgtaaaatctttgtacatttttgtgatttgttttttgggttttttttgcaaatgtgggggaagatcattcatagttttgtttaaattgaattttcaaaaaaggccataacccacaaattgttaagagccatcccctaactcagcctgtaccttcatggccctcagctgttgaaattcccaccagtctgctggcatcattgcatccctcccaattactagattttcccagtgccttcttcccagatcattccttctcaatcctgccctggcatcagaatcacctctagaccctgtacagaatacagctgctcaggccccttctcaaaccttctgaaggatgaccttgggaatggggctcagaaacctgtatgtttaagaagctccacaaatgattctgacccagagcgctataagtcagcacaattttctttctttcttttttttttgagatggagtctcactctgtcgcccaggctggagtgcagtggcgcaatctcagctcacaggttcaagtgattctcccgcctcagcctcctgagtagctgggactataggcatgtgccaccacacctggctaattttttgtattttagtagagacggggttttaccatgttggtcaggctggtctcgaactcctgacctcgtgatccgcccacctcggcctcccaaagtgctaggatgaaggcatgagccaccatgcctggccaattttcttattttctttctttctcattttctttccttctttttctttctttttccttccttccttccttccttctttccttccttccttccttcctttctctctctctctctctttctttctttctctctctctttctttctttctttttcagggtctcactctgtcacccaggctgagtgcagtagcatgatcatggctcactgcagtctcaacctcccaggctcaggtgatcctcccacctcaggctcctgagtagctggaaccacaggcttgcaccaccatgcccagctaatttttaaattttttgtagagacagggttttgccatgttgcccaggttggtctcaaactcctaggctcaagtgatcctcccgccttggtttcccaaagtgctgagattacaggcatgagccaccacacccagcttcaattttctttacaaactttgaacaaaaggagatacttcatgaacgtcctcttgtggaatgatctcctggagggagacccaaagcagcccagtcctcccacaagagactcatcatcatctagatctggctttcctggtaagatcctaactaaagaaagagaggtgagcaaaggaaaagaaggtatttccaccttcactagtttataaaaaataatgtcagagtttcaatatttacagaaatgccctcactttttgaaatgcaagcatttgatgccttcacaaaagctagaatttttttttttacaaataccccatacacagtggtgtgctggtaaatgttttacaatcagctctgatttgtagcattgcctatttccatggtgtaaatactcccatcctggccaatttgaagctaccaacttggctcacaaatttcctgaaaattaaaaaagcctctcatatgccagtacaagcctactccatcccaccactgcatatggagagtgattatctgggagagatggcttctggatttctccataggctcaggcatgcagaatgattcagagagctccatttgcttctttattctccttcagaagattctactgcgtggcctactccttccgaaaccagtgcatgttcgacaccgcaagtctttcatgatgatgttgaaaaaaaataacatcctgaagatgttttgacaaattaatttgacttttgaattattttccttttgagagaataaaatgttccaaaggtctcctgggaagagattgttcaaataaggttttatattgttgattttgttttaggtagttaatgctactacctctttatctgtgggttagtaaattgacgtttttctccttcatttatctgtgtctgctagaactgtttgacattctccacccacacaggttctgatgacattacttttactcattgtctatttacctgtgaaaggatgagctgttcattcatgggcataaagagcaatgactgaggaaatggactagtgtttttccattaatttttataatcatgtcttagttcactatgatgacgtacagttttctctttgttccagagaactatcaaaattgtcactgacatttatttacaaccatgatttgtataggacagttttagaaacttgaataccagtagtttgtcaagcaagatacagcgcctgcttctctagaatcaggggatgtttaagaggttatctagtccagcctcacagcttgtctcttagatatctttctgcttctgtgggaattaatgacttctactgactgtagatttgtctggagttttgcagaacaaaccaaatccttccccacataactatcttggaaaacctggagaactttcgacctttggaaacttgatgctgcctcctaaacttttcttctcaacctatgaaatgagcttctcatggaaattattttccaaaatagatatacaaagcacaataaaatatgttaatgagagaatcagctaaattgattcactcgaatcatagttgctgccacaagtcaggtgcattcctattttctttccattacctctagtgtcacttcgtttacctctgttttgtgcttaacttcttagacaaatttatctttccaatttatcttatttgataagaatattagtgaaagacagcagaatcttctaagagagttatctaagataactagaagctaataattctaaaagatgcttcaaggtccaaaaaccctcttcagtaaataaatgcacaaaggcattttgataagcatttgatgtagccgataactattatagcactttaaaaaataattatggtctttttggtgattaatatctacagaaagatttcaaatcatgaaactaaatcattaaaacaatctctgccttatctgatttgtatattaaaacttctctgtgctcacttaacaatgttcttaaacaagtcaaaggtatttttttttttttttgagacagagtcttgcactgttgcccaggatagagtgcagtggcatgatgtcggctcactgcaacctctgcctcctgggttcaagtgattctcctgcctcagcctctcgagtagctggaattacaggcgcccgccaccacatctagctaatttttgtatttttagtagagacagggtttcaccatgttggccaggctggtgtggaactcctgacctcaggtaatccgcctgctttggcctcccaaagtgctgggattacaggcgtgagccaccatgcctggccacaagtcaaaggtttttctgaatctgaaggctttcataggtagcttcttcttgaatggtaataataaggtgttttgtgatactaattttaaattattgatttctgtgaattttaaatgatgaatttatatgaatgggaatggaaattatattgcctttttattgtgaaggtcgtcttgtaggataggactatagagagagcagaaggaattttgaatatctgatattattgctgacaaatattttagaaaaactatataataggttaaagtaaattttcttcattgatttattatggctaatatttagggcaaagggtgatatactctcgtgagtcagtaactgctaggataacttattcagtcaaaaaattttccctaggcccgtttaccgccactccccctaagttgaattcataatgatgcagtgctttggaaaacagctctgtattaatacaaggtaaaaaagcccccacaaaataaaagcttcttttaattatcctagcatgaaatgaaacaaaaagaaaagtaatagggtagacgctaatttcatctttctttctttgtttctctttgtttctctctttctttgtttctctctctctttctctctctctctctctctttctttgtttcgacggagtcttgctctgtcgcccaggctggagtgcagtggcgcgatctcggctcattgcaagctccgcctcctgggttcaagcgattctcctgcctcagcctcccgagtaggagtagctgggactacaggcgtgcaccactatgcccagctaattttttttttttttttttttgagatggagtctcactctgtcgcccaggctggagtatagtggcacgatcttggctcactgcaacctccacctcccaggtttaagcagttctctgcctcagcctcctgagtagctgggattacaggcacccaccaccatgcccggctaatctttgtatttttagtagagacggagtttcaccagcttgaccaggctgctcttgaactcctgacctcgtgatccacccgccactgcctcccaaagtgctgggattacaggtatgagccactgttccaggctgtagcctcattatatgtcttattgtgtttcaaaattctgcagatttcttagacctcagtttccccttttggagaatctttggagaaaccagaagccatctatcccaaataattgctttccacatgcagtggtgggttggagtaggcttttactggcatatgagagcctattttcattttcaggaaatttgtgagccaagtgaccacacattagtagcttcaaattggccagggtgggagtatttacaccatggaaatagtcaatgctacaaattagagctgagtgtgaaacatttaccagcacaccactgtgtatggggtatttgtaaaaagtttgtagctttcttttgtgaaggcatcaaatactttcatttcagaaagttaaggcattgctgctaatattggaactctgacattattttataaacttgtgaagctggaaataccttctgttcttttgctcacctctccttcaattagaatcttagtagagatattttagatgtcatatgtaagacaactttgaaattatattaaaagcaaatgcataattaagattacaaaatgattctgtaatatgtctctgcagaataattctgtaatatattccatcttgactgcccattaaaaatcagatgaagtgagatttcacttttaagatatcatgttgatttggttgttttctaaatttcactctgaaggaagaagcaagaagagagaatataatgctgtcatttcttttgcaatcattttttgttcctttgccttttcttggtttcctttctccacttttttctttactttttcctcatttcttctgtaagtgagtaatctgtttttgtaaccatcctaccccctcgtgttgtttattggacccctggtgacttgcatttcctttaggaatatgcccagcatttttaggctgctaaaatatgagccaattaatgatgttcttattgacgaggtctaggaaacttgtagggttcagtttctgcaagaatgatttacagtctataataggttagaatgtcaaacaaggggaaacaattagtagcactaatgttttaaccccaggtttatcactgagggaggatcattgatgaagaggcccatctgttccaaagatgtttccaacttgcttgtatagcagtttgtaaatcaaatcagtgcggtgattgtgaggcttatatagccacttgtttgtcaatttttaaaaatcactgcttttgtgcacatttcatcatgatatctttgaaaaatggggttttacctgtggaaattacactattgtttttcagcattatgttcagtttattacatgtaccaggaacacgtgttttgaaattgtcaccagctccaagaattatgtaatcagtgagttaaatatataacttccaaatgaattagtgcacctatattttggcaaaaatttgttgttggaggaagaatagattcatcccagagtaagtttcttgtctattttcaggataaaagatgggagaattctgttactataatcaagttctttcttaaaatacccttaacctactttttttccctctaaataatgaatgctccacttcttacatagaatttcacaatttacaacccacattcacatttgttatttcatttcctgttggatattttccctctgctgttttcttcctatagaaaggccattgaataattggctctaagatttgaaaggagtcttcagattatctgttcaattactgtgcctagtgatcagcctgtctcttatttccaaaaggagaagaaaatattagataggtagacagactgatcatggggccaaataacagagtgaaagtaaattttcttttcataggagtggaagacaatattattttttacttttgtctttttatttgatcatttatgtcatgctcaccctactgacatgtggacttctgtttcagtggctctctggtcactttaaggcataaattccttttaccatttgggaacattgctaacttgcctccagcttcaaatttcacccacatggatgtgagtttctggggtgtaaaagagtaacattttatttttgaggcaagagacttctttctttaaagctgcttttttactgatttagttatttcaaatcatattaatacaaattggggcaaattaagagttacaagtctggacttaaaatcatttgcctgctctggtttggaatttatgcagctatttctgccttaattaaaactgtggatatttttaaagcttagaatttattcttatcttattctgacgagaatgcaaatccaaccaggcacattaaatgttctgtgatacggatggaaaaagatagaaactgggcccagccaggctggatttggtttgtgagaagatcgtcttttaataatggcttgattgatgattgtgtgccatgtgaagtaactggaatgctggatggttacatgaaattgtgggaaaattgacacaatggggaaaagatgcttgctgagcctatgaagtgcaacctgtgcaaatatgatgattcctcaattgcaagatcaggaactcaggattactgtgtaaaaaagaaaatgaaggccgggcgtggtggctcacgtctgtaatcccagcactttgggagggctgggtgggggggggcggggcagatcatgaggtcaggaggagttcgagaccagcttggccaatatggtgaaaccctgtctgtactaaaaatacaaaaattagctgggtgtggtggcgtgcgcctgtactcccagctactcaggaggctgaggcagaagaattgcttgaacctaggaggcgggactgcagtgagccgagattgtgccactgcactccagcctgggcaacagagtgagactctgtctcaaaaaaaaaaaaaaaaaaaaaaggaaaatgaattagtgaagaaagtaagatgatgtaaaaacaaccatccccagtgtcctgagggtagtgcttctagccgctttccccgctcccccaccccgttgctaggagagagatgagttaacacacagggacgtgtacattataccagccggatccacatacctggcagctgcaacctgttaaacctgtgtttttttcttctgtgtaaacactataaacaggaaggcaaacgtcatccatttacgcagaagagaaaattgatgatgaaaaactgtcactgctttgcttaaaaaagtctaaggtaaagaacgtattgactcagagagggccattcaaaatctaaagtcttcaattttattgctatttctgtattaaggattctgaaggcaaaatttcttcagaatctgttgtttagactttacaacaaaaatagctttggggagctgcttgcctggagaggttttgtggtgactatggaaattaatcttcttgatgggaaatcagctgttcaccatactgctgccttcattcccaaagaagagtttccattcctacctggaatggctagagcctgttggctagagcaatgagccattgaggcctcctgatattccacccgggtgcagcctccttgaagctgcctcaagcccccttcagttactcctttattcccttcactgctccagaagggttttcaagcatctgcagctgcacctctgtctcaagggcaagctctactgtcagccacgctgctgcaaggatgggattgaaaagcaagaccattcatttactctttcattcacaaatttattgaactgatatttaagcttagaatttattcttatcgtattcttacaagaatgcaaatccctactatgttccagactctatgtgggggcacaggtgacacactggtgagctaaaatagatcccatcccaggactaatagaccttacagtctgggtgacagaggagttaatcaaataactacattgatgaatgtatattttcaaactgaggtgttaaaaataacaaacccagcctgggcaacatgacaaaacctcatctctacaaaaaaattagttgggcatggtggtgcacacccatagtcctagctactcagaaggctgatgtgggaggatcacctgagcccgggaggtcgaggctgcagtgagccatgattgtgccactgcactctagcctgggtgacagagtgagcctctgcctcaaaaaaaaaaaaaaaaaaaaagaaagaaagaaaagaaaagaaaaataacaaaggaactgtggacttagactaaagctactccaaggaagctgtatttagccatacttagaaggctgtgcggataaaatatgtgaatatgtgaagcagagagcattatagggacgagcctcgtggctgaaagaaggatggctgaaacacaggagggaaaggctggtgccttgagaggcaccacgccaaaccacatggaggttcaagatctcgtagagaattttggtctttatcatgaaagcaaaggggaagttactgatgggttctttggtggaggtgacctgaggagggttgcgttttaaaaagaaagctttggccttgggagggaaaagagctggagagaggccagaggggtgggaggaatatcccagtttggaaccttgaagcagtttagttacatatccaacattccttcaccgttgcctcactcctgaacattgtccattgcatgtctgagtcttcttccagactctacattccttcagtttaggaatgctgacatatttgcttttggatcccatgtagtgtctgaccctgggatttgcatgtatgtccaacaaatgctgtatttaaacaatgtggctgttccgcatctcacaagtcatgttagttggcttaaaggagcatagctcttctgtattctagtgataacattatatagtgatctaagttattcctgaggacagaaggagttagagatacacttgccttttcttttgctatcatatgtgccttgcattttatttccgtacattagtatcttcaatataatgacctttgttgtcctgtcttcatgtcaacctaaagcattgttattgtcattagtgttactaccgcctcacaaatacatagatatattgggggagatttttcctgagagaaatctgcagatttgaagagaaaccatgtcatacattttctgagtctgaaaatcaggagttgcaaacataaatgagtaaagcagcagtagggaatggcgcagcctgtggcagaactagggggagcatgctctatcccaaagcattcacattcgaacacaaaatatactgtgctagctaaaccagacatctgggggcaagtgtggcttagtgactatgggtttgttgtttcttctttaattgattaaaaaaagatttaaacacagagaagttataaaaattttcagtgtaattaggggttgtgggccaagctttattgagtgacatgaagcttcaaagttgttttggggaagggagcaggaccaaaatgccttcttagtgcaactttttcaaaaaaacttgtgaagccagcttctaatattcccctggctacttgctctctctctctaatgggctgcagcagtttctcctgtgcctcaatcaaatgaatacatcacataaatgagggtataaactgcatgagtttacagaaaggaagaaggttattattacctttgaaatcagaagccaagaaaacatctcttctcacacctcctcatctcttctcttactttctgggcaagtccctaggggtaattttattagagactctccctcaaagtaaaaactgaggggggtataaatagccccgatcctgctcccacctgatccttagattaagattagcataagctcaggctgagaggtcaccacaaggtcatagttttctggggtgaatagtcacttaattcagaaactcaggaatctcatgcaaagaatgcttagttaacatatttccaggagaaaaataattctaatttgctttcttataccaagaaccagcagtcttagtgattttgtaaatgcagaaattgggcccgtgggatggatgaagcagaaacgagcagaacaacaggattaattgagatcactttgctgctacgttctgcaatttcattactactcctaaaacgcaatggagagtctcacaaacaggcaacagtgacttttgttagtattctgagcccttcagcaaagtatatcctctttgggctgatttataccataaggataataaaaatacatgccttacacattttagtgggctgttgtgaagagaaaattagattatgtatggcaaggaacttcacaatgacaagataatgtcatgtaataataatattaaagaaaattataggaaacatatagcacttgctatttgtcaggcactgttctaagcatttacattcattattttatttagttcttataataaccttccgtatgggctagaatctattgttatctctaatttttagatggaaaaacagagccacagagaactgaagtaacttgcccaagcctagacagtaagaattggtgctaggatttgaatccatgcagtctggcccctctcaatcactatgatttaggaataaaaacaaaaaaacaaaaacatagacgtttaagtaaaccagaagactagcatttgaatcctggcttcccaggccatgtaactatggagacagtcttcttaagcagtctgaatttcagtttgtttatctgcaaaatgaagttggataataatacttatttttagatgtttggtcaggattaaataagaaaacatgcaaagcacagtgtttaataggaggcacgtagtgtgttattattattagttattgtgggtgagatggtatattagtcttgtcagactgccatagcaaaatatccacagactggctggcttaaacaacagaaattaattttctcacaggcctggaggctagaagttcaagatcaaggtggcagcaggggtggtttctggtgaggcctctcctcctggctgccgccttctcactgtgctctcacatggtctttcctctgtgcagaggagagaaagagggctctggtgtctcttcctctttttataaagatgacagtcctattggatcagagctccacacttataacttaatttaaccctaattacctccttaatacagtcacattggatgttagaccttcaacatactaattttgggtgaatacagttcagtccataacaggtgggtagctgggaggcgaggaatagaaggatagaaggggtattttaatgtctacggtagatttttttttaaggcatcgctgctggaggaaaaaacccatcagatattcataatacatttgtaggtatacaatatatttggctctgtatgtcatagaaaacatctccatgctatctattaatcttttaggtgagcctgaatttaaatacattgggaatatgcatgggaatgaggctgttggacgagaactgctcattttcttggcccagtacctatgcaacgaataccagaaggggaacgagacaattgtcaacctgatccacagtacccgcattcacatcatgccttccctgaacccagatggctttgagaaggcagcgtctcaggtgagtgccaggcagctcagatcaggcgtgctttcttcattttctgtatgtttgtacatacatgtttatctaaaaattatgccctcgcacaaagcttacagatggtgcagtggagggcataagtgatgcattcattattcaactcaccagtaagaaaatagtttagaatgaaagggattatgggtgagtttttccagtgaagactgcaaatcagaaattgtgttaagaagttaatgttctaatagtgttctgttttatgtttttcaataaattattcatccatttttgtgactaggtaagttttgttttaaaaatctacaaatataaaaaatatctactgccttttgttgaagagtaacgccatgggtgtatgtggatgagccagtgtcacagcgccctctactgaatttaaggaagaaatacttttggccggaataatgttttactgatgtttacttggtttttacatacgctgagtaaagttaaaaaacaagcgaaaaccctacctcttaactaaaaataatttaatatatcttcgctgttagatgaactggaaagtaatgcctttttaagagaagatatatggtgtgtgttcctattttattggacggggcgggggacattatatttgctgttttctacagtttaaaataattttcttagtctatgggaacatgggaacacattcaagttaatatttagcatgtttatctacagctaaaaaatccaatgacatagtttgacattgtaagaaacccagccaatttctgtaaataaatataaaattgatacgatttctaaagttatgagagaaaaattctagtaatatataaaattaaattatttaatattttaaggtaatattcagaatttttagacacatgggcaacagattatcattgctgttttctgtcttatagatttttatccctcacagtctaaggtatctaaacttccatgacttaaaatatgtgggaaatatatctatatcatgtgatataatttaacagtaaaacaagaaaattcacattataaaatgaaacaaatataccgaaaatttattagttttccagattgtaccattagttaaatgaagagtttaaacgggagagaaattcctcaaatcataaagccctagaacttttgttctaggttcatattttttcatgaagactataagagggagacatgttattagtctataacgcatgttaaattcattttaagcttctaatctttagttattcttctaaatatttaaaaaataggttgctgtgatttacagaggcaatgaatattttacttaaatctaattatagaatgatatgctttgaaataggtcatttataactagtgaatatatattgtgaaatttgataaatatctctttatattattaacatttaaaatattattcatcgaacatattttcaaaatacttatgacaagtacagtgatgcatctcttaataatggggaagcattctgagaaatgcaatgttgggtgattttgtcattttgtgaacattctagagtgcacctacataaacctgcatggtgtagcctactacacacctaggctatgtgatatagcccatggttcctaggctacaagtctgtacagcatgttactgtactgaatactgtaggcaactgcaacacactagtaactatttgtgtatctaaacatagaaaaggtacagtgaaaatacagcataaaagataaaaacagtacctttggacagggcttttaccatgaatggagccagaagttgctctgggtgagtcaatgagtgagtggtgagtgaatgtgaaggcctaggacattactgtacactactatagaatttataaacactgtacactcaggttacactaaatttataaaaactatttttcttcctgcagtaataaattaaacttaccttactgtaactttcttttttttttgagatggagtctcactctgtcaccaggatggagtgcaatggcatgatctcggctcactgcacactccgactccctggttcaagctattttcctgcctcagcctcccaagtagctgggattacaggcacgtgccatcatgcccagctaattttttatatttttattagagacggggtttcatcatgttggccaggatggtcttgatctcctgacctcatgatccacccaccttggcctctcaaagtgctgggattacaggcgtgagccactgcacctggccaccttactgtaacttttttactttataaacttttaaactttaaaaaccttttggactctttgtaataacacttagattgaaacacacaacacattgtacagctgtccaaaaatcttttctgtctttatatctttattctacaagcttttttctatttttaaaacttttttaaagcattttaatggtttcttagtttttcaaatgttttgttaaatataagacacaggctgtgtgcagcagcttatatctataatcccagtgctttgggaggcccagaggagaagattgcttaaggccaggagtttgagaccagcctgagcaacatagcgagaccctgtctttaccaaaaataaaaaacttagcctagcatgattgtgcacatgtgtagtcccagtgctttgggaggccaaggagggaggatcacttgaacccaggagtttgaggttacagttagctgtgattatgccactgcacccaagcctgggcaacagagtgagaccctgtctcttagaaaaaagaaaaagaaactaagacacaaacacacatatcggcctaggcctacacagggtcaggatcatcaaaatgtcactaggcaataggaatttttcacctccattatagtcttatgggatcactgctgtatagtctgtcagtcgtggtaagaaatgtcattatgcggcccatcacagtactttaaatctgataccttcatgtttatataagtaaagtagtgaaaatgctgacatgggagggcattgttgaagtaaataatcttaatagttattttaaagagcattgatagggaccttaaatagaaagtgacataataataagcaactaatgatttttctctttgacttttttttttttagcctggtgaactcaaggactggtttgtgggtcgaagcaatgcccagggaatagatctgaaccggaactttccagacctggataggatagtgtacgtgaatgagaaagaaggtggtccaaataatcatctgttgaaaaatatgaagaaaattgtggatcaaaacacaaaggtagtgaccacgggatagtcttcttgggttcgtctctagcctaaggaaatatgttccaatatcttcatcatcatgaaggacagaggagtaacatcacagcttgtatggggtggttaactgtggctttaagtcaaggctggaagggctggtgccatgaaatttgtcctggcccctagaattgggccgtaggtggagaggagttggaggtgcagatatagggaggaacccagttgtaggtttcttagaaaatcaccatggccttctcagagaccctttattagctcatttgatcagctcctcctgccatattaccctgttgctccttttctcttttccagaactttctcctcccttgctttacaaaactctactttctcctacctcttctactgtctttcaaatcactactcagtttttttccctgtttcttctacctgggcataaatgctggccattttcagggtctcatctgataccgttatttgcttccctgggcttccctccttacctgtactttcagtgttgtctgttacacaaggtctcccagatccgtgcctctaactccagaccttccacagagatttatgtctctgttttactagctaacttgggttcctttaactggtggaacttgatatctcaagctcaggttgtccagaaacaaatattttcccttagaaccactattctttcatttatcccaatcatcaaagcttttgatttttccatctctgtcaccgctcaccagttaccacctctcagcgatttgatctctctgacacctcttccatttcccttcttctgcaaactcattcccctgcctcagctgagatccccacggtctcctgctgtaactggcacagtggcctcctacttgtgtttcatgtccagcctctcccaactctattctatcttctcaaattctcaatcttccagagtgacctcacacacaaattattgctcttttgcttaaaaaaccttagcagctctccactgcccagaagataaagtgaaaacttaatgtgatggttaagtatggagactctagaggtaaccaccttggtgtaaatcatggcttcatacttgctgtgtgaactttgtaaagttatttgacctctctgtgcttcaggttcttcatctgtaatatggaagtgataatatctacctcataggataaggattgaatgagttaatacatataaagtacttgaagccaggacctggaacttttattaccatttcagtgtaattttttggtactctctgttatgtagctcagggctaggtggacacatttacatatccactaaacatttggtgcatctttgaaccaatattgtcatcagtcacttggaggacaaattgagcccatcttggaggaaaggtgaagaactgctgtcagcagccctctattccttctctattgttctgggtatttctgctttcatatgtcccctacatgtagtgtctttcctaagtgagagctcgcaaagtaccatttctccatttcattctagttgctgggtcattccagcagctcttggcccctggaagctgccggctggtttattccttaagctggcttcgataccctatagactcaactcataccaactcttttgtgctcctaaacataccattttctaacaattttatgtcttcagatgagttgctgctccaactgtctagaattctcttgtctttccttccatgccactccctctgtgaagtcatcctctactcttcaagacagattcttttttcacatgttcttcatctatacttccagtatgggcttactgttacatccagctttatgtatgttatttgtttatacacctgttttcccctttgattctagaatttgatcacttgattgtaagaattacgattaatatttgattatgacaggcagtaggctgagggcctgttatgaataaacacaatccagctcagcaaacaaatcacaatatctgaaaaagagggccactgcaagtaagcagacaggaatccagacaagtgttcatcatggggttgggatgctggatgaaggatccaggagacagggagccttagattattggtttaaacttttaaaaactctcctgcctatatatgggattcattgcagaaacatgggctgagcctacaggtgggggctggtcttcttagtggtggcaaatccatacaggtcttcagcaacctcaattcttgcctcctcagaagaattcgaccaagaggcataaggcagagtgagagactaaagcaagttttagagcaggagtgaaagtttattaaaaagtttagagcatgaatgaaaggaggtaaagtacacttggaagagggccaagcaggcaacttgagagatcaagtgcactgtttgacctttgacttggggttttctatgttggcatgcttacaagggagcaggaggttgtgtgtcttttcccctgattcttcccttggggtgggctgtccacatgcacagtagcctcctagcacttggtaggcactgtattcacagtgtgtttatcgaagttgtatgcatgctctcttgagttgttcttcccttaccagttgagtgttcctactaagtcacataccagttaatccgtgccattttgcctcttagtatgcttaagcccacttgcccaactcctgccgtcttatcaggaagccgatcaccagttttaggcttttctgtctgttgagggactgcctttccctggcacttgctgcaaccaattattatgttacagaggcagtttaacaaccgcttgaccatcacctgatggttgcctgacattcctggtggttggagggccctctcttgtcctgctcatgtctgactacctacctaccataacatttcccccctcaagaatccaagacctcaattctttgggaaaaatggataaaggtcagtcttctgtaactgcttcctactgatagaggggtggtggtggttgttttgtgggtcttcacctcttgctagctgtcagggtaggatggctccatgggttggtaaaaacagtatccagccaggctggagggagaaaggggtggaattaagcctctgtcatgtcttgttgatgggaagtctaggggtcctctgtagaagggtgactcttgaatactgacatgatggtgtctctcactgaggatcatctggagcttgatggcctgaaggcaagaggagacgaattagtttattagatttagaagaatgtcaaaatgaaataagggagtgaggacaactccaaaaaatcctgacgctgccaacacactcaggtaactggtggctattttcgtgcctgctaagacttgtgtggatggggttacaagccaattccaatgtgttcccagaattagaatattgatccagatttttacattacccattcctcttgtttcttctgagctgtggccagagatcactggttggttcacaggaataaacagggttagtctaaattgcagacaaaaactcaaaaacaactgctgagaatagaatctaataccaagttattagattatagtctgttatgttcttgaaacataacttttctctctccagtcctcatttttattaaaaacaaatcatgataggactgatttgtttgcaaaataagcattagtcctatcatacttggcctggttatttgcataaagcacagcaagaataattatttgccatataggctcctttttaaattggctttgatgaaacttcattccataaggtatttcagataagacgttttaaatgccttgagcccagccatgggtttctgccatcaaatacctgtatgaattgggtaaattcctctcctcttgaggtcctaaataacctggggctcctaggcctgtcagaaagtgacattctttactccccatggatcaggaaccctgtacagggactgtgtagacaaggtatgagaccagttttcccaaggggtttttattggctctataagtcaaatttgattccttaaaggagagcatgccattccagtcaaacccttggtaaaataaccagtttctccaattgtgccttgttgcaaaagaaaacagattactattgcacttatgcaaataactgtattgccattagttaagaatacccacaaatagtttccaaattctggagaaatcaggtagagagaaatatgctccaaattttgtttacaggagtacttatttttaaaagctgtaaatagctcaaaagaaagttttcttgactttgaaaaacaaaggatcagcaatgttttaagcaaaaagtcataaaaggattattttagtcttcttttagttcagtccatgcagttaactcctgttctgcctggtatttgtgaacatttcagctctccatgagagtcctgaaagttctttctctattctaatgttacaatctttaaagttatcagcaacctgcattcaagagtgcctgccagagtcctatagctgattataaaggccaccttttaaagaggattaaaacaagacaacaattgtgaatgagaaaaagtcttagggcagccacagtcaaagacacagttgccaagaaaatttgttatttctgtggcacacaattatgtagcataacagttataattattactgacaatgtatactaagttatatcagaattataggagctttgtataattttggaacacatacaaataacacatttatgaagagtagatcaatgctttactaaaagtctgttgtgcttttcaatttgtggaaaaactgaacaatagttctttaactttagccaatatgattaggcatagaattttttttatcagattgatctttcacaaaccttccacaacttgctcaaaccttcagctttatcctatctaactttaaaaaatcctttaactctctaaactaggtcaaaaaaatccacatttttatgcctttttatataatcttttactaaaaccacattctactttccttacatgccttgcatataaaagttttccagtagtctcaagaacatgttacactgttaactcttagcaacttttacttttggtgaaaaacctgctaagtaagtgattctgactatgtactaggtttgcagcttaggacactagacagaaatgcagaaaaggtttgactctttctagcatctagggggcatgggtaactctgtatgtccccgggcctcacgtagctttaaaggcagcaagttgtacagttaggagtcaaagtagcagtttatgaagcatttagtaagcctaataacttttaaaactgtataactttttaaaaataaattctctttcacagatcttttcacaacttacacagaccatctatgacatgcttggactttctgatttgtcccaaacattcctctttttaaacaaccagtcatttaatttaggacaagaatttaccatacaagatcctttctcatataaaacttctgttctttataatctgccttaccaaaaatacctcctctttctctttatagcttttgaattatattaaagtcattttctttctgttaggaagttaaggtttgtactgcatgttgctgtgtgaggattgtgaagggggagcagagaagaatgaggttatctgcatactgcagaagttatcccccctcaagagattgctcagttagatttttgctggggcttgtctgaataaatgtgggctatttctgtatccttgaggtaggactgactaggttgaagttattagttaaacatttaggtaactttccagaagaaatagagctattagagggaaagatgaatttagagactgggtaaatattaatcaggcacccatcttggaaagcatatttttgcccaaaagagtgtgaatcttttcttttggaaggaggaggtgccatttgccccattatgtggcagaatttggaggagagttcagagaaggagattagcacagagtaggcagctcttaaatcccaaagggaaatttataattttactcctccaggagtttctcttagctttgtcttgtcaatgacttggaagccagccagagcagagagccccttcagctcaaggccattaggcattgggactctgtcccagagccctttggccctcagggcatccaatttccagtagctaagcttgtggcagagggggcaagctgtgctaggcttcctctcatttgtcccattggggcagtttgccttccagtggcctggcttcccacaccaatggcagttacctgaaggagtgtttttagggaaacctggatgggggctggagagcttataaagcagccaataattgagcattcctcttgtttctgcatttttccttctccttatctctatcctccttattatgctctcagttataaaagactgaggaggctgatttgagggtttcctgcataagggcaatgggttccaaggctgacttttgtattttctcccagttcatttttaggccaaacgatattacaaaggaaagctagttttgttttgttttaagctttgggggagtcaaatgtttctgtttttggggatgcatctgaggagtatatcctgtggtatagagacatggttacccatctgtaaagagggaacagaggagaaaaaaaaggaaaaaggaaaacaaaggcatcccctcttactttcctgttatcctagataagcatctcccattcatccttagggttctggaatgaaccagtcttaccgtgtacccattaccttggttccatctcatcacaattacccacttgagaacagaagagatactagagtaaacagtgggacccttgttcatccttgggactctggaataaccgttcttactgtatacccctaacctttccttcatctgttttaatggtaatctgttaacctagaaccaaccttcatgtctgtcatatgggtcttttgtgactgcaaccttgggctggcctatgtccttgtctccatgacattatggtgactctcactcagagcattgtagcaacaaaatgattgtctcttttttcagatttccttcccatgttctttaagtagatgagaagcctgtttttcagctaactgccacaagatggctggatttccctcccttcgaatatgaccttgaaggtcttggtgcatgttaagaagggcatggaagtgattagagaaatggaggctatgggaggaagtgagataaatactcatggaaagctttcatatgcgagtgaaacggcaacatttatttgccctcttaacataaagtagtaacctccggaggacttgaggcttgaggtaagaactcacaagtggcaaaggaagaattttccctcctttcaaaggagtgttaactcaaaaaaagcaaataagtgagatccttaaagggccacagtgaggacctatgcagacacacaaagtacttaaaaagtcactggaaaacagccctggagggtaacagggacaaaaagtatacaataaatcataagggctgggattccaatttgtatctatcctggcaatgcgccaccagacaggggatgagttggaggtcatctgagctggtagggtaaaaacaagtataaacctcaggggatatttgcaagggagcctatgtctttgctgctgcacaaatgcagcaagagccatgggcacacaaataacaaggagtgtgtgtttaagaagttacatggcatgtgacgtgaaagcaaacaagaggcaggcttgcccctgaggcggatggtctagctggtgtacaaggccatttgagaacacgaaggagaataggaggtgaataggtggagtaaaaaggagaataggcagtggttttggggaaatagccaactttagttgaaaaagcagaggaaaccccagacattgcagtgttaggctttagttctaccactcttgtaagcctcctgtccaggagggccattagtgtctgagttctactcggtgtgaactccgagttccttccacccctccgagccacccattagagtgaactgaaagatcagctagcgggagcagagccattgtggctgagaagaattgttctagtggttggtcagtaagcaggagagcaaaaagagagaaggaaactgcatacaggggttgagtacctccagccaaagaaggtgaggcatagaggtcctttaccactgggaaacatatccaagtcatgtggcacaaaggtatgttaccagtgatgaatccatatgggtttgcagcaacctcaattcttgcttcctcagaagaaagaattaaattgagaaacataaggcagagcgagagactgaggcaggttttagagtagcagtgaaagtgtattaaaaagctttagagcaggaataaaaggaagtaaagtacacttggaagtaggccaagcgggcaacttgagagatcaagtgccctgtttgaccttttgacttggggctttataggttggtatgcttatgcttctggggggttgtgtcccttttcccctgattcttcccttggggtgggctgtctgcatgtgcagtggcctggcaacacttgggaggggcgcttgcacagtgtgtttactgaagctgcgcacatgctcacttgaggcgttcgtcccttaccagtccagtgttcctagaggaaggtcatataccagttaaactctgccattttgcctctcggtgcgcatgtatgaacccatttgcccagctcctgagatcttattgggaagctgctgatcaccagtttcaggttttttaatctattgggagactgcctttcgctggcgcctgctgcaaccaattattattttagagaggcagtttaacaacctcccgcccatcacctaatgtttgcctgacattcctggtgttgggagaaggccctctcctgccctgctcatgtctgactagctacctactgcaacagtctgagacaaaggctaccaaaggctgaggacactggcagaacctgataagtgagtgacttaagctttcctgcttctgagtcatggatacacgtcactgtctcagcctgaaaattatctttcatgggagagggggagccagaaaggcggcaggctggggtaaccccaggtgaaagagggcagtcctgtgtggtaaaccacgagggctgagacagaaatggaaaacttctggaagcggagtccccatattagcctacaagctttccccattgcttgcattgacttgcttgtgctgtctttgttaaatctgagaaatgaagaaaataattccttccacctatcatagaagaatggtgaaatcaactcaggttgacaggatatttgattgtcaactttgtgcaagcaccattatttctagccagcactaccttcttctccagctgaacctgaatatttgcataatctctagattagatgtttttgtatttctagcttaggcaatacttatttaaaagaggcatgttcatggtactattttttaataagagcttttgtttaaaacaaactcagtgtgacttcttttcataaaggtaaattaaagaaaaatacatgaaaatgaaagattagtccctttttggaacataagcaagatttgtttactttacactaaatctttagtaaacttacttcataatcatggggtgatattgcctatgtctggttcatcacctttttccatttttgtctgtaagtgtgagacagtgttttgacccagcttggtacaaaatatatagtaggcagttcattaatgttattatacattcctcttccctcttccccttctcagcctaatatctgtatttgtatcccttatagaggttcttaaatgtcaagatttattcttctgtttggtggaacagggaatcaaatcagattaatagaaaatagaaatgcagattcctcctcctttgtatagctgtgagaaaaaaaaaaaagaaattcatattcccacataagctgatccaggcctggggtgtgtgtgcttcaggagggggtggtgggaaggaagttcattcttgcaaagccctccagatgctggaggtagctgagacacatccactcgctcgagatccatgctctccttgttcttctgaacttctctgaataaaaagctctctcttgctctcccagacttccttctctaagtcgtttgtcatcggctcttgagctcttcagcctggtcacctccactgttatctgggctcagtacatgagccttggcctgaaagcagagtcaattaaaatatacccagccatttattaagtttaccctgactttaatagctagagttgtgaagaaaactgaataaatagagcttcaacataatttaagaaccaaagacatctaattatagaacatcatatttgagctgtatttataatctttaaatggaaagtttaaagaaaggccacaattgtttctagtttctattaaaggctcaattttaaaggtactccaaagtcttctctgtggatcagttaaatatataattatagtacacaggggtctcaggatttagtcagactaaaagattctgttaatagtcaaagggaaatttagtttaatttatcaaattgtagaatttgcttgcttttgaacatactggtaacatgcatataagcaattgtgtatgatgtaagaactagtaataggctaaacctgatagcttcacacaactttgtgtatttagggctgtatctttcaatttgtttcaagaacagtttcttttaaaagttttttattgcaaaattcatattttattacaaaaattaaaacatgcaaataaggagaaagaagaatccattaccctacaatcttcagtgaacaccattaacattttgatacgtacctttcaaaattattttttatggctgtatcaacctgtaaatatatggtgcatactgtgcaagccattctgaacacttttaggtggataacaaacacaggaatacagtctgccttggcatggctttgcctcctaactcccactaaaaccaaccctccctctcagagagtattttccttacccccgacagatgggccatgggtacttccaacttctttatttttactactcttttctcttttcttctcctaccccaattcgtccctggacttggtgaagttccacctccttcctgaagtcctcaatgattctccaaaccatggtgattttgcctcttctgaacttattgaaatgtgaatatttgtcaatatctgccattgggttaaagaaaatagagggaatgagagatgtacaaagaagaggaggactgaaaataaattcaatagtaaaagaaaaacttttgaatagaatattatagaagagtgtgttaaactcatctcatataatattcatgtcatgttagcaattggatataaaaaacataaattcacttaaaaaagcatatgcattatagagtattttgatttcatctcccatattagttatttttaggttgatttaaatcaaaatataataagagtgtatttcagatccctgtggaaagaatgcattattgaatacatggaattgagacaaatccatctcataaataacagcatagatcaaaataaattctagacactacaatttaagtttaaaaagtatgaaactagaaaactttcgtaaggatgtaatacttagagggggatagaactttctaaatttcttgtatagacactagcacatagtggtcacttaatacttattgaacgaatgaatgaaatggaaaagcaaagagaccataaagaaaagatcaataggtttgatgttatgtacttaacataaatatcttaatgctctgtattttaattacaaaatttgaaaggcacatgacacacttagaaaatatttatagtgtgtaggtcagagctaattttttttactaaacaactcttgcaagtcaaaaagaaaagctatgcatttctcccagcactttgggaggccgaggcgggcggatcacgaggtcaggagatcgagaccatcctggctaacacagtgaaaactcgtctctactaaaaatacaaaaaaattagccaggtgtggtggcaggcacctgtagtcccagctacgcgggaggcggaggcaggagaatggcgtgaacccgggaggcggagcttgcagtgaaccaagatcgctccactgcactctagcctgggtgacagagtgagactccgcctcaaaaaaaaaaaaaaaaagctatgcatttcaatagaaaaattagttaaaccatataaatatgtcacagaagaataaatagaaataatctctaaatataaaaaacttctagttttattagttaattaaaataatgcaaactttaaaaattctattgtcattaatcaaagtgacacactttaaaacacataataattccattgttcttaaaaagattagagatggaaggtttattatactgttgctggttatatttctgtaccttacaggaatgcagtttggaatacatttttaaatgtaaacagttttagctaatatagattttaacttaaaacatttttagctaaaaacgtgcttagcttttggtcaagtcattcaatttctagggatttctctaaggaaagtacagatttggacaaatggtagctacaaaggtgttcatagtatttttaatttttaaaatataaacatcccagtatcacctcttggagattactagtactagtgtagtggctgtgtagccggcctggctgggcttgagaccagcctctgccagtaccagctgagtggcctcatgctgttccctaacttctctacatctcagtttactcatctgtagggtgggggaaaatgtagtccctatttcatagagtaaatgggagaattgaatgtctgacacagaaagtgtttaataagtattagctatcattttattagtatttaagaatggtatatccagacattggctgccactcagccattaaaatatcattttagaagggtatttaataacatgaaaaggtgttcattatctgttttcaagcaaaaaaagcagtatataaaatggcatataaatgatcacatttaaaaattatataaatacattgggaaaagactgaaaaagagatatatacaaatgttagtagtggatatctttaggtggtaaaattatgggtaattttaattttcttctttgttcttgtctgtctctacattttctacaatggatatatatatatatatatatatttttttttttttttttagcaaaaataagatctaccaaccaaatgaaaaataataaaaacaacctcctactctaaatcacacttttccacagttaacagtagcttatgtgaaaataggataattttaatagactaaagctgatacactagaaacagcgtgagccttagggtttcactgactggatgtgaactcttagctgtgtgaacttagatatgctatttaacacacccaactttcagattcctccttgtgaaatgggtatgaatatctttgcatatccaatacgaatgttgaagtgcagtaaaatagttcatgtcagaactattcataaacagagcagagctatacaaatatgagatcttataaccatcaaaccctactgatgccattagattttctgtcctaaagaacagcatggatcacgttgccagtaaaatcttttcttttcatcagagaagcacttggggtttgagagtcttcctagttgctattaaaaactcattgcataaaagtatcaagcttttggctccacattatttctttggtatacatttcttttttcctttgttttgcttccaagatatgaggggcagtgaatcattctaaagacttaacatgaattcttgaaacttgcctttattttaaaatttaagatgaccattccaaagtaaacatattttacagtccactctgaaagagactcaacctaatattctttgataggaacaatgtttgaagtaattgagggaagttgggaaaatagtaagcaaaatttggaaataaactttaccacatgtttgaaccaccacagaggacaaatcttgttctgcagttcaattattttcttttctcctcatattatccttaactattcataataacaatgtgtgaaccactacagatcagacagcgatgtcccaaaatttgtgagttgcatgctggttttcaagttacaaagagaggataactggcagcccacaaaaataaaactttgaaagaaatttaaacacttttgaaacattttttattaaaaatctgagaaagttagacatgaggaatactgcttttgtaggaacctttattttttctgtgaggacaacagcaaaatagttgaaatatgaccagctttcagttttttcctttacctttcctatgtcttttctgtcaagtgatcataccaatgattattaaatttataatccttttaatctctcatctgaacagcttgctcctgagaccaaggctgtcattcattggattatggatattccttttgtgctttctgccaatctccatggaggagaccttgtggccaattatccatatgatgagacgcggagtggtaggtattctttctgcttctcttattggttcaaagtttataacactgtacaaggttttataagatgatttctgtaattttttttaaggaactgaacattaagtgatttttgcctgaagaaagaactatgtttaacaggaagctctcctaatcatttcatatggtgttggcatatctatttggcagaaaaggactcactttttcaataggttaggtgaagagaaacgtgatcttgacagtacctagccaacagaaagggagaaaacacacgtcataaacttgggtcactcttggacactgataaagtggagagattacagaagttgtgtaggttcatgtagaagatggcttaaacatgggggcagcctcttggtgcttgatcaggatccctgtggatctctacatgtgtcttattgtgttgacacagttttgcatttggaactgtttctggtggtgtcagggaggggaagtggtgctttggctttctctaactagttttagttaagcttcagacaaagcaagctttagccagacagatattttcaaattgttttttgttgctccagggaatttcctgctttggatctattttctggggcctttgaagagttagctttttgtaaaaacaggatgattagtttgtttttttttttttaattttagattcggggtacctgtgtaggtttgttacacggatatattacataatggtgaggtttgggtttctagggtacccatcaccaaaagagtgaactcaataggtaatttttcacccctcacctcctcccatcctccccgcttttggagtccccagggtctattatttccatcttaatgtccaggtacacccattgtttagcttccacttataaatgagagtatgtggtatttgatttctgaattatttcgctccagataatggctcctagctccatccatgtcgttgcaaaatacatgatttcattctttttaatggctgcttagtattgcatagtgtatatgtaccacattttctttatctaatcaaccattgatggacaattaggttgattccatgactctgcttttgtgaatagtgctgccataaacatatgagtgcacatgtcttctttatataataatttcttttcctttggatgcatactcagtagtgggattactaggttgaatggtagttctatttttagttctttgagaaatctctgtactgttcctcatagaagttatattaatttacatttccaccaacactggtgggaatccacgacaacatctgttgttttttgactttttaatcatagccattctaagtcatgtaatatgatattgtggttttaatttgcctttctcagatgattagtgatgttgaggatttttccaattattttgactgcttgtatgtcttcttttgagaaaagtctgttcttgtcctttgcccactttttaatggggttgttgggatgataattttagatattggaaactgagtgttgaagaacgtctttggggaaataacattgttaaataaatttgaagactttgtggtttgttgataattgggaaacttgtaggcctgcataatttataatgcatgaataagaacacagtgtatcaaaatatgttatttatttctataatacatacaggagatttaaaaaatataaaaccagatattgaatggtatatatgagaatgattcatagtgggtatgaggttagtataggtacattttttaaattaaagatttaatgataaaaatcttcctcctattctcccaggcctagtttactatgactttattacctttccctgcaaagctttcaactcataagtagaatgtacattctacccaatttctactttgtagtattaggaatggaaattttgtaacttaaaactaagtgtaattatttagtatttaaattttacctctttcccatagttatgtagctaaaaaaatacatcaacaatacaattactcaatactgaatcactctttagaaaacatgctgtgctgcttggtctgtgtctgtttctttaatcttgtggatttgttttctaggtagtgctcacgaatacagctcctccccagatgacgccattttccaaagcttggcccgggcatactcttctttcaacccggccatgtctgaccccaatcggccaccatgtcgcaagaatgatgatgacagcagctttgtagatggaaccaccaacggtggtgcttggtacagcgtacctggaggtgagtttccattgtgctctctgattatgtgattgtagcttatttacaatgaccatttaggtttagagagtgatttagatttagagaatcttcaatcgtcctccatcattaaaaagtagactgaatctatagttcttccattaaagtcaactttttgcgtgaatgattactatgtataattttgtttttgtggattttaaaaattgtgatgctaattgaagagatacaggaaatgaactgaagacattcatttggaaaataataaattgaatattgttaactaccctactttccaaattcaagccttagggaataagatggcatccttagtttatgccagtcatgctctttcactgtaggtaaatatatattttagagggcttgttttggcttttagcataacctggtgcacagtacttttgtattaaatgatgggataatggggagtatttgacatggaatatttagtttatgttcactattctaataatctctatgagatcaggtagctttttgccttttagtctgaaaaggaagcagttgccatgtgggacagcagctgggggaagccccttcctaggtagccaaggaagctctcttgccttccttgtcccaaggcggactttacagagctcgtattttcactaacactcaaggatgaagagtgaaatgcgaagatatttatatatatttttacttttctctttgcctgagaaaaattttctatggcccacctggaaaaagaaaatttgttagggtaataagcaacattagctaattgaagggtattggtatgtttaatatgcttaattttgttgaattatgtgctgagaaaaatattctttctgatttttttctttctgatacatgttaattctgtttttatttatattttgcattttatccagatcagacttagtactctttccccaatagcttcagaaatatgatctatgtcaaatttaggatttagagcatgtctagtacatcagatgggaagtaattttatactttagtttttataaaaactttaatgacttcttggaattcctttttgaacaaatagtgtattgtcaacaaaatataaagtaatctatatcagttaaatactgataataacattattaacaatagtaataatgttagttaacgattacgtctcgcttaactaaacagtcaaaggaagctccgttagtcttcagttctgtatatagtgaataacattcatgtcttaggtcaggttttctagaagcagagcctgagatagggatttgggtacttgtaatttattaagggattactttttaggacaaaccctgtagggaagtgagggaagcagggcaaggaaggggatagagctaaacagggttgtggtctcaggcaaagtccagccttggcctgagccattggaagaagcctggagcataaattaggggcaggtttgtctccccttgagagaaagggaccagcctttggtggctccatatctgtcagccattggttgtggggtgccagcaggaattgggggtgagagatagcatgatgtaactcccaagccaggtgggagattctggctcccatcagcaattctctggaaaaggggtgggggggtagctgtgagctctaacagccaacacctgcagcagtttgggtctggatgccctgcctccataaaagcaatctggtgggcactaacagcatcctctgctaatttgagtcagatttaaattaaaattgttctgaatgcagaatattctctttggtgctatttgaagtattgttatcattatatcttgtatgtaattcaactcagggattgttgaattagcatatagtgtgaaaggaaattaaattctaggaccccaaattcatttagctaaagggaaaagtcaagctgggaactgggtcacacaaacctgcctccccattttggttcctaaataagatgattacaagatgaaagggtacacgcctcccccatattttgcccacagggaaattctgggtgagctgttaaaacttcaccatggccatgtaaattgatagcttatctttacaggtgcaggcaccccagcccaccagacacaaatgcgtatccgattgcccccctaccccattttgtctgcgttatcttatgtaaaatgcacattccccacatttttcctctgtcccctttggtttatgtgaaaactctgtgcttatcaatatcccaccctctcccctttcaatttggagccctcaaaatcatcttcggagagaggcatagacctgtctctggggcgcatccttaactttggcaaagaaatctcctaaaacaattgagacttgtctcatcattttccttgattgacaatagtatattgccaagactcccaatccctcaggaatacactatgatattgattgggcttaaggaataatatagtatgtcagatcatgtcacatgaagctccaagttcttctccagtagaaaggtagacttagagggatgtgcatttctttaatagatcagtggggatgaagtcttttaccctgttgtcttctccgaagcccactccagcaatgtggaaggtgggtaatgtctgcattagcactctgcagcagcaaatgcttttgcttaggaacctgagagtttgtgcttttaaggtataacaacccccgacctatgttgttcaatcccttacagcagatgatttcccttaagttttcccacaggcttcccaaatgccctggtttgtgtaccttttacttggttcttgattcagaagactagcctgtgtagagttttaggctccttgtgcatattttgactttccatttggtgttttggcagggatgcaagacttcaattaccttagcagcaactgttttgagatcaccgtggagcttagctgtgagaagttcccacctgaagagactctgaagacctactgggaggataacaaaaactccctcattagctaccttgagcaggtaaacacagtccccagcataaaaatgcaaggtttacaagcattcaaacctgtcctacaatggtcttgtaagaggagtccaggagaatccgtctggtgcagaatgaggatgccatatttggaaggcaggtgtcagcagtgtttcagttaggcttttatttgtcataggttttgtggctcaggactattcaccaagaactgactaaactggagagtatacagaaaagacgtagactctcgtttctgtttgtattattctaagcaagggcaatcctaggactctctcccaccctgatcaccgtgaggcatcccaggcagagccagaacaaaagtaaggcaagcgaggcacctgaatggaaaatttaaggaggattttaatcttaggggcatgcaagtacaggattagcacttgagagtgagtgtctctttaagttttgagctgtacaagcctcatctttctcaccctagactcaactgcatcacaggtaataataataataatgagttatgtttgtcatttactatttcccaggcattatactaaatgccttttatgtaatagttagttcatttaatccacacaacaaccttatgagggaaattatcatcatcatcattataatcatcactaaattaaagatgaggaatcagagacacagagaggctagacagctcacctgaagttgcttagctagaatctgaatcaaggctgtctatttccagaatcaccatgctgtactgactttcagaacagaagcctggatctttaccagagagtcatttatgtagccattccaatgtgatccatatagaattttgggggatctcaccatctgccagaataaaatcctttacctactcaggccagtcctctgccaaccccaccccctgcatagtatgtagacactggccccagaggcagtggcagtggaaagacctaagactctgttcattcctgcagttctttgccagtcttcaaattttatcctgaatgtggccatttacacctaaagtcaagtagagtgatgttagtttcatgtgccaacaaatagtccagaccaatctgttaaactaatttgacataaaaaagctgttaaataaacatttaagtatttatatgtgtatatgtacatataaacatatacatataaaatcaacactttttttaaagtaaaaccaggagttgaatccagtttctttctccaccattgcaaggctctgttgcagtggtccctatagcttgctatggcctcctttgaataaaggctgctctaaaaaaaaaaagaagaagaagaagcaaaatcagcataggaattcttttacacatgtcaaatatccatatactgtaataccttaccagggactgtcgtggaatagatccactgatgtcagatggtgattaaagagcactcattccactggattctttttaaatcaatggattcctgctgcatgttagcttaaaaaggtattttccaacaacaaaaactaaggataagcagtccacgatgactctagaacaactttggtgggaacccctacagaatgtctcctttgaggagagccgtatttggatggatcttctgagagcaaagttaactgaaaagtatgtttttggatagaggaagtaagatgggactgattggggtgttctccacttacatatcaaatacagtgctttttattttaataaatatttaataatctttaaatgtttaataatatttgtcttaatactccttaatacagtgcttttaattttatgtatatagtttttcaactaaaatgtattgactagtttcacatcccaggcattctgtgaggcactggggatagtgaccgtcctcaggaaggcttcacacgagtgctgtcagaaacaagaatacctaatcacaagagaggaggagagctggctgaaaaacaataaaagcttagctacaaggagcaataacagtacacagaaggggacctaaccgagtcacgggagtttggaaaaggcttcttggagccgggctataagatttactaaagttgatgccaataagatcatcactgtgatcaacaatttaaaaacatgcttagctgctgtttaaatcatctcttagttcttgagaaaaaaaataatacaaaacaaataaaacacgtcttcttaccatcaggaaaaaggagatttgtcatacttatggtagcaggtgggcatgcatccaattcatctgacagtaatatcaatttatatataaataagctaaaaagaagaaggttaaagttatacaatcctattttatgccacgcaaaataagaatttgctctgtccacagatccatgtgatctaccttgatatggcattgtcattaggatgcaaactgtgtctaagcagtgagtggtatttataaccagctcatctagcttgcatcatagaacactccagtttaggaaaacaaaggctgatgaaaaatcagtgagggctgccagaagttctgtgttgtaattgttgtcttgacaatggtggtgattagtaattgaacacctgggcctaaaatctaagcttggactagtttacaactcatggaaaataggtgattaggagatctatttctgtaattgtttgagaggaaatcccttgcagagttttaaagagatgtttgcagggactagaattgtaaagctaattagagtagagagtctgctaaggagaagagcctcccttccactcagtagctttgaaagagtctagttctcaaaattctcaaaaaatttcttaaagaatggttcatgggccaggcgtggtggctcacgcctgtaatcccagcactttgggaggccgaggcaggcagatcatgaggtcaggagatcaagaccatcctggctaacacggtgaaaccctgtctctactaaaaatacaaaaaattagccgggcgtggtggcatgtgcctgtagtcccagctactccggaggctgaggcaggagaatggcatgaacccgggaggcggagcttgcagtgagccgagatcacactacactccagcctgggcgacagagcgagactccgtctcaaaaaaaaaaaaaaaaaaaaaaaaagaatggttcatgggcacctgcattagaatcacctagagttcttattaaaaatgagtttcctctcctaccattgaatcacactctctgcagggcaggaccgaagtatcttcatttgcagcaagctatctgcgtgacactaagtacatgagggtttaggggctataaacagtcctagcaaaaatggagaatcttctggaggctttttcagccttcgctgaaactgagatgtcctggaatctggggagcaatcattgcaggcaccgcaagtgtagtaaaacagcttctccaggcatgagtgaaatttggactttcgtgatttcttttgcaaaagccatacaatctgaattttccagtctgaattcatgggggagttgacacagcccatacacttctactgagatttattactacactggaatttttcaaacagaaaagttgacatatcacagacagacatttacttctttaactatttgttaaactgcatattgcacatattgcaatataagtcttggattgcagaagcagaaaaaagtaaagccatgaatattaacctaatatatttctgcctaatacaggcaaataatatgttcttgtagtgattgatttacttactttacaatgatgtgggaattagaacctttctttaaggcttatgctattgataatttcaggattatagtgcctcaagaggaataaagtacttgggtaaagcctcttttatcagctagcatctttctaagttttattgaatggggcctcattttaagaaatttagagtttgggtctctatatatagcccttttcttcttctctacactttttctgatttttcatcttttaattcagaaagttaagttttcatgtttcatgttttccaatggctgaatttcaaactcttttcaattttggttggcttattagttatggagaaaagttagaattgaataaatcttaaatttttaaaaatatatttactctactatactggttgccaataaaatgatcattattactgtttcctatttgcaacattaaaaaattacatgttatttttatagggtgtgagagttttctttttttttaagaaaaatggcacacacaaaaaatattgctggtaacaaggcacatctttttgataaaacagtgtaccactgccgaatttattctttgatgacaaaggattacaggagacttatctgtcttctgtagggaaatagtcaagtatcataagtagcgaaagacaatttattttctatagcccgattgagtgaggcacaacctgagcatttgggaggttggtgcatattttgttgagtaatcaagtttaatgcattacgatttgatattctagatgcagtactttcttaaagacctgaagcgactctgtcacttcaaacacatattgacttagatgaattgtctttccaaaataaagagaaaagcagtttttgtagtttgcagtgtattaaataatagccagttgatgactacaacttaatttagggggattattttcaatggcagctctcccatcttctttctaaatcaacattctattttctgttatgaggctcactactctattttcagccaaaataatgttaatagatttaatgcaaaagcagtcacagtatatatctttttatccagaatgagctaatattaacaggcttttattatgatatccttgttaattgacagtagccatataatgaatacacaggtgaccaaaattgaaagagagtaagttatgaaatgcactaagactagaactttacacatattggagcaggacgagctgcagacaaaacccctcagacaccgagttaaagaaggaagggctttattattcagccgggagcatcgtcaagactcatgttgcaaaaacccagctccctgagtgagcaattcctgtccttcttaagggcttacaactctaagggggaccgcatgagagggtcgtgatcaattgagcaagcagggggtacgtgactgggggctgcatgcaccagtaattagaacggaacagaacaggacagggattttcacagtgcttttccatacactgtctgtaatctatagataacataaccgattaggtcaggagtccatctttaactaccaggcccagggtgtggccccgggctgcctgcttgtggatttcatttctgccttttagtttttccttctttggaggcagaaattgggcataagacaatatgaggagtggtctcctcccttaatatgacactttttaaaatgatttggaaggtactaaaatcttttttttgggaagcaaacaagacattaattttcacttatctatttagggaaaagcagaataaaatgcacaaaaaattcagtggccttttgtgcatgtcttgattcttaaacaatgggggtctacggtatttgctggaaaataaagagatgcttgatatgaaacatatttaaggccatttctataaatttataggtcatattaattttttggttatttttgaccttcacagatacaccgaggagttaaaggatttgtccgagaccttcaaggtaacccaattgcgaatgccaccatctccgtggaaggaatagaccacgatgttacatccggtgggtctttgccacaattggaggctctacgttatgtacaagagcataattactaattatcataattataagtcttatgttcttctaagcaaaacaaatagctcgtatctctacagcgtttctcagctttgatctggtgaagtttcctttgtgggctcaggtcaggcggagtgagtggagcccagggcggctgctgcgttagaaatccgggtgcagcagatggcgccctttcctcagctatctcgccccagagctgggaggtggtgccacaggctgccgattcttcgcggttcttcaggcaaaggaaaaggagctgctggagttaaaataccagtgactttctagtctctgttaagaagtgctaacgagctgcgaatggggagaccgaaggagggagcggaaagaggaggaaggaagaaaactgctgcgggttgtgtgtctaaaaattctcacacagtttttcatttaatccgtataataaatccgcagggattcaaggttaaacaagagtttataggattgaggtgcgatgttagtgacttccaggttttgagctccatttccatttccccagtttgaggaaaatgatgcatttttctggcaagtctacctactcgcattaataaacattgatccaggtcattttagtttgtcatttgttgggatcttttcaataatgacaactttttctttttagctgtaaactctttacaattttttttagactttgtgacaattaacctttaacttatgtcccaaaccactctgtaccatcaactctttcttaaccttcacatttatagcttggattaaaaaaaaatctttaacatttgtcctctaaaactccattcattcttcatgtatcaacagcccactaggtgccagccagtatgccagaatctgtgccaagatgtcagcccatgtagccccttagcccttagctgagagggtgaaacccagcgttagtatccctgccacaagaaacctgttagccctaatatgtcatacaaatattttattttctctacattccatgatgtgaaatgtttaggaaaatctaacctagggaataaacacgtgggaagaaattaaatcagaggaggggctctagaatactccagcttttcagggacaaggtgataataagaaggaaccagcaatagaactgacggtagaaaatgaagtgtgttgtactgaaggtagaaaatgaagtgtgttgtcctggaggctttgaagtgcttcaagaagaagggagtgaaaaagcgttaattaagatgaaccttgtgaatgaatccttggatttagcagttcagaggatcttgaaaaaatctgttcaatggagtgaatggtgggatcctgattggactgggtccaagacagaataagaaaagaaccattctgagattgagaacatgaacaaacctttccagaaattttgctataaagcaaaaagacaattgaggcactagctgcaaggagatgtagatttagaggtagatttgatgatacggtgatgggggcttaatttttttgactgtacctatttttgcaatgaaataagatgtaaagtaacaactgggaggttgaacaggatgtgtaggggtgttaggaaaaaggagaaggtgtgaagtgtctacgaaaaccttgctcttcaaagtgtggcctctgctcgcaaccttagcattgccctggggctggtcaggaatgcagaacctgggagctggaatcagatttttcattttaccaagttcccaggtttgcacccaagtttgaaaatcactgacttaggtaaatgggagattgaatggactagggtgcccagtgtattctaagtctttagaaatctaaatttctaactaggacctcagagatcctacaagggctacctttggcccacactctgtgaagattctctgaccagcaggtcttcacctggcaagaatcaaaacatgatggctgtatgttctgaccctgctgcttggggaattcatctgtctttttacctgtgttgctcctgatgtgattagaagatctatgatcgtacgaggtttattagacaatttaacattgatatctataaagtagctataagaaatgaagcctgtaaagagagtttcacaccctattcaataaaatttcattaaattccctatatatttactttaaaaatcgagaatcaaaaaaggtgaactgagctagactgggtattccttagatggcataattatgcattgtgtaattctgcatatttcatgtgctttgtgatttgatattctgccttcctacagcaaaggatggtgattactggagattgcttatacctggaaactataaacttacagcctcagctccaggctatctggcaataacaaagaaagtggcagttccttacagccctgctgctggggtaagtaatcataataatagccaaacgctataataataattaagcatttatcattgtcaggcatactgaagtgatttatatttaatcttcgtactagccctatgaggtaggcaacattgttatctcaacttaacagatgagaaaactgaggcttagcaaagttaatatgaagctctattaccatttctcagtttttgaagagatttacaagaaaatgaaataaaactttaaaaaattaaatttttatttgctaaccttgatttccatctcaatgggattatgtttcatttgcctttttatctttagcacctagcgcagtgcctttctcaataagtatttgaaaaaaaaatgatgcatataagaaaattttaggtggtaaccaaacacttatttagcatattttatgtgcaaggctctctgtgctaagtagtatcaaaaaccatatcttatttaagtagatctcatttgtttgttaggaaggtgatggtgataagaccaaaacttctcttagagcagaattttactactacctttgtattatatgcctgggaccgtgggaatacctgtaggatttcttgaaagtctaaaaagcttacttgaaaagaatttattattatttttgtttatgtacccaaaacttggagtataaatgcttgatttatgcaaacaaaatatcttgagtttttaactggtatatggttttgattgtgtgcatgtatgtctacattgggctgtatatgtattaaaatcaagaggtatatttgggtaactgaaacctggaaaaaatggccctgggaacaagttgtaaaggttcaactattttgatcctttgtctttctggcatgtgttagtgcaaggatatagtcagtgtaatcacgatccaaaataatcaggcgtttaagtggccaaatcaagaaactcttagttccatctgggatggggcctgaggggattggggttgggggctgcctactttgaatagccttttatgcggagtgtgtggcttctccctagacctgatgaagattcccattcacaaagagagtggcttggacacatacgtgcttttgtcagtttctttaacaaattcaagattctggatagcagaaccttgtggtttgggataccagcatgctgaactgtattcttccacattccctcccacattaggaaaagattcaaggctgacaggaggtgctcactaaataaccaaaggcagaaaattaactataagttacatcctctttttttcttttcttttttgagacagagtcttgctctgtcgcccaggctggagtgcagtggcacgatcttggctcactgcaagctctgcctcccgggttcaagaaattctcctgcctcagcctcctgagtagctgggattacagcgtgcgccaccgtgcccggctaatttttgtatttttagcagagatgtggtttcaccatgttggtcaggcgggcctcgaattcttgaccttgtgatctgcccacctcgacctcccaaagtgctgggattacagacgtgagccaccgcgcctggccagttacatctttttatgaggagaagagactggggcaagaattttgttgaattatatctgtcttcaaagctattaaatcaaaggacatttcaaacataaggcttttgaattttgcttttgaattttttccccctgaaaatatcttttgtttattgcaagagattttatttcaggatttactttaattcaggtggctggattgagtgtatactgaaactgctcttatttttttatttcaatttaaaaaaacacatgcagtttgataataatatgttcttgattttctcttttaggttgattttgaactggagtcattttctgaaaggaaagaagaggagaaggaagaattgatggaatggtggaaaatgatgtcagaaactttaaatttttaaaaaggcttctagttagctgctttaaatctatctatataatgtagtatgatgtaatgtggtcttttttttagattttgtgcagttaatacttaacattgatttattttttaatcatttaaatattaatcaactttccttaaaataaatagcctcttaggtaaaaatataagaacttgatatatttcattctcttatatagtattcattttcctacctatattacacaaaaaagtatagaaaagatttaagtaattttgccatcctaggcttaaatgcaatattcctggtattatttacaatgcagaattttttgagtaattctagctttcaaaaattagtgaagttcttttactgtaattggtgacaatgtcacataatgaatgctattgaaaaggttaacagatacagctcggagttgtgagcactctactgcaagacttaaatagttcagtataaattgtcgtttttttcttgtgctgactaactataagcatgatcttgttaatgcatttttgatgggaagaaaaggtacatgtttacaaagaggttttatgaaaagaataaaaattgacttcttgcttgtacatataggagcaatactattatattatgtagtccgttaacactacttaaaagtttagggttttctcttggttgtagagtggcccagaattgcattctgaatgaataaaggttaaaaaaaaatccccagtgcatgtatttcagttctctaagatttttggtctggcattgtggtcttatgatgaaaacatgtatcctcttaatggcggcttctcatatattcatcctgtacattttaaaatttgttaagcaactactgtgtgctaagcactgcatagcctctatgtatgttattgtggcaggcaaaaggttctgattttgggcacaacctttatataaataacacaaaaattaatgtttggacacaaactctaaatcagtaacacactggttaatatgtaattatgcattgtgataagtaaaatgacaagaaagagtagggaaagagaaagaatgacagagcaacttaaattagactggatgagaagagtcagggatgcatcttaatgcacagacctagaatattgagtgggtgtgagcagtgcagagtgcaggggtgtgtgtgtgtgtgtgtgcatggtggtggtggtatggttgatcaatgctgcaagtgtaagttttggttaaaatcgtgctgttataatagtaggcccccacatatatcctgggttaaacacaatggaagtgtattttttgctcaggtacctatactggaaaaagacagaaagatggggtgacttttcttcacacagtctgggaccacgttctgggatccattctgacagaagatctgccatcttctgcacacgtccaacactgccgcattggtggtcgtctccattgcagccaataggaaaggggaaagagcaagggggagaatgtagagggtgttcttatgggcaggcctgggagtggtgtacattacttctgttcacatcacactgcctggaattgtacattctttggccacagtaactgcaagggagtctgggaaaggtagtctagaagtgtacccaggtaggtgaggagaagtggactttgggacagaatagcagatgcaaaggcattggggtaggaaacacatggcttgatggagattgaagaaggacagatgtacaattgcctaagagaagcccacagtgagaagaaaaatgagattgaaactgagctctgaagagcttcaaaattttgcttcttgaggtttagataagataggatagactggagtatgctgccgtaagaagcaactccaaatcttagcgttctaacttaatagtaattgatttttcatgcaaagtctgtaggtctacgtaactctccaggaactttgcgctgcatgctgtgacacaattatgtagaatgtttccacgtgcggttctgccatctcagcacaaggtttcctcagtctcctgtgttggtcgcagaagaagataactggggccactactgcccacagcccacaggtcagagctagttacatggccttgcctaaccacaatgtttggtaagcattgtcactgccgtagtcctctctctggtgccaacacaactttgctctcctgtttccaaaagtaggactcactttgcaagggagacgatttacagccacatcaaatcatggctttgagcttcaatttc

SEQ ID NO: 123 - DNA, 48051 bp, Homo sapiens
  source 1..48051: mol_type = genomic DNA
tgcacctgtgccttccagaataggaaccccacccacttgcccctcttccccaccaacgacacagcccagtagttgactcaggtgccaggagagagcgcggggaggctgggcggtagccagggagaccaagggaagcggttgccagagaaatgcggcgtcagtcagggccggggctgcaggcgcggggcgggggaggagagacgcggcctcctcccaggcgggcctggcgggaggcaccccggcttctaagagcgaattcggctcccgactctcttcccccagctgagagcacggtgcaaggggccagggctgcagggagcaaagtgcccccgaaaaataagcgcgcgcccacgaaagcgcccaagagcccaggcgtctgcctggcttttctcggtcacggggtcaacgcggggccgctcacagagccttctggtctccctgggtcctctaggaatgaggcagcaaagcctcggtcgactcgaccgctgaggaacccatgacatgaaaaagcctcggggaatgacgccgggtgggacaccccaaggtgaggacccctttgtgggtgagtccccccacactcaggtgactccaggcgggcacaggcccgcccaaccgctcgtcatcacggggggcgactcgtccagggccccagccgctgctccgccaaacctgaggccgcccctgagtctgggcacctggcctcgtccggcactgaggagaatgaccagaacgccaggccacatgcacccactcgccaggctgagggtccgaacagcacagcccagagtgggctcgggtcgctccccgcctacgccacctccgcggcctgcaagcctaaccctctcccgcccatgaccaggacccacctcaatgccgccagcccggcgggtctcccgggcacgaagccccgccagtcttccgccctcgcgccacactacctggccagccccgcccccgagactccctctccggcgccaagcgaaggtgtgaagccacgtgacctgcccaggattgggaagccgcacgaggggcttgagccctccaccttaaaggtgccgcgaccgccgccgtcgtggggctctccacagagcacggggtctacgccgtcagcagccccgccccgtcccgcccgggcgcccccaccgcgcgccgggtgctaaagagacccgcagggggcgtgagcttccagcgccagcggcttcgggtctcccgtgcgacggcagtgtgagaaagaaacgttccgggcgccggtgctcctttatgtccggtcagctcccgtctggacagacgctcgaggccgcctggaggccgcagtgcggctcggaggccccaccggccgcccccgcagggctgcggcgcctttaagcccaaaggccctgagtcacgaggaggctccctgcccccctcgccctccacccctccacgaggccccacgcccgcgggcacgtgaccgcgccccgcccgggactcgcccgcacggggcgggggatgggggtaccgcggcgccggacccggctgcgcgcggaccgttagctactgcggccgggacgcggccccgcccaggcgagcggcgggtggctcttaccagcgggaacgccatggggccggtgtggccctgcggggctgacgggctgaccggccagccggcgggcgagagacgcgcacgcacgtgggcactatttttgcagcgggccgcgcgcagccccgcaccccggcagcttatgaagctcctacgagccgctcctcggagccgccccccggccggatgcggagcacctgtgtcggccccgcccgggccctcgcctccgccccctcgcgccccgcccctcctagcaggccgagccgaggagggctccgccgcccacccggaacccggcggggactgccgccgctgctagccacagctgccccctggggggccagagacctaagcctgagcgcgccatcacctaagtgacccttgccgagtcactgtctgccctgggcctcagtttccctcttaacgaaagagggcacgatttacaagcccctgcgagcggcggcgatcgcttcgtcagtagagcctcgtgtccgcgctccttctcttccagtgatctctccagggcgagagcctgccctggcatccttggtcggaactgtagcccctgggctccaggaggcgcactcactttagaccctctgctccgtgcgctgcagagggggccgcgagagtcaggaagttccagaaagttccaaagacatcactggtcctctttggaccggagttctccggagaaaccgcttccggcgctcctgacacactgagatagaaagtttcacagaaatagggcaagggatagggcgagggctccagggcaggcgtcctagggcacctggcgcaggggcggaccggaaaccccaggcaaacgcagagtcggagatggcattccaggcggaagatcaagcaaaggcagagagggaggacggcaccgagcggctccctctgaccaggactgaggatgatgcgacctgataccgccggagggaagcctgggcccggtttgtaaggggcctttattctgcagacagcaggaaaactattagagaattgtaaaaggggttggcagttgtcgggtctgttttaaggtgttgctggagacatagaagaggttggacagaaaagggggaaaacaagggactggagtggggaggaaagggaccagagtttattgaacattgctaagtgttttacatgtgtcatgttatcatgatactatttaataagcactaactatgctccggtcctctcctggcacttaggaaggatggtgctgccgtcttcctgggcttgatctaatggctaaggggagagggacaggtaactgtcagtttctgcctgaggtgatggagaaagaggaagctgatattatagtctagtgtttcagaaggattaaggggggaagggtggtgagcataagagtagaagtccacgagggggtgagtgacagtgggagttggccagtctccatccacttggtctacttacaggagcttctttgggttgctgaggtcatgggcagaaagggtgatgactacagggacaaggcaggagcaacttcgctgggacccctacctcttgagccatgctttctccaggagtagcctacttgagtcttgtcctggcccacaagcagcgtaggatggctgcttctgatagggtggcacacccagatgcctacagcacaggagccaagtgagggtgggcgacagcactgaaggcccaaggcacacccaaaagggctgttagctggtgggcaccatgtagaaacgaggtcccagcccagtcatctttcaagaaaagctggaagtacttttttaagtgaaatcttgaatgtgaattttaatgttggttattaattcaaatgaaaagagccaagcccagcatgtccaggggccccatgcagctcaccggctgccagtttgtgatccctgacatcgtttcctcctctctgacccaaaagctgagcaagataagaacctgaaacccagaatagtgcccaagggagcgggtgtctggaggccctgtcatatttcaaaactgtcaaccataagaaaatgaaggcatctttcaagagacttggaacagaaacttctgctgcctaaaatctctctccctaaactttctgttgcaggtaataataatagctcgtcttcactgaccacttactgtgcgcgtgggaaagttttgagtgctttacctatgttatctcattttgcagatgagactgaagctcaaagaagttaagtaacttgccaaaagactcccagctaaaagtgtgagagcaaagactcaaaccaaggcagtcttctggtttcagagcctgaagtcttaaccaggtgagaataaaacttccagcatgcttatgtgtgtgcttatctgtgaatgaccccagagctgactgcagatgttgagagaagaggtaactttgaccaaatgcagtcatgacctcaggtgtgggcaagtccttgttccctacctggacttggctaggcctgcaggtcatacaggaagaacagtccctctgaaggtgaccataatccacagggcagggtgtggaaagtgacagaggtgaatttattaaatgacttggtcaagtccccacagctggtcactggcagaagcagcagaaacaaataggcagcattatctattctcccagtcaacaaacagcctttgagcccagctatgcctggcactgtctctgcagtcaagccccagacttacaatactgattttaagtccaactatataattagctggactacattttaaatatgtgtactagggaaacaggagggaccctatagtcttttatatgctcaagtgttcagtgcttctgcaggaggcagagagctaaaagaagagagaagtttgatgggagaaaataatttcctggttgcaaaagataagaaaaggaattcactcaggaactcaagaccacaaggtagacacacacagtctctgctcaagttttgccaagctctgtacagaagaaaccatgttctttgttttttcaagttccttttaagtgggataaaaaagtggattggggccaggcgcggtggctcatgcctgtaatcccagcactttgggaggcctaggcaggcagatcatgaggtcaggagatcgagaccatcctggctaacatggtgaaaccccgtctctactaaaaatacacacaaaaaattagctgggcatggtggtgggcgcctgtggtcccagctacttgggaggctgaggcaggagaatggcatgaacccaggaggcggagcttgcagtgatccgagatctcaccactgcactacatcctgggtgacagagcgagactccatctcaaaaaaaaaaaaaaaagaaagagtggattggccccacctttcatcgtacacaaaagtaagttaaaaatacaattctgaaaagctttacttagaattttttcagaagaaaatataggagaatttttttttacctcagcccgtggatgaattttgtaaacttggaaaaataagattggaacaataagcacaggatataaaggaagacaatacatttgaccacactggaattaaaaactttggtttactaaaagagtttgtttgtttgttttgaggtggagtcttgctctgtcgcccaggctggagtgcagtggcacgatctcggctcactgcaatctcagcctcccgggttcaagcaattcttctgcctcagcctccagagtagctgggattacagacacctgccaccgcacccggctaatttttgtatttttagtggagacggggtttcaccatgttgcccaggctggtctcgaactcctgacctcgtgatccgcccgcctcggcctcccaaagtgttgggattaggcgtgagccaccgcccagctaaagatattgtttaaagcttgaaaagacaagccatagactggaagaaggtatctccaatccatgtatttacaaagaactagtttccagactatgtaagaagttctgtaatcaatgaggaaaaaacacaactccacagaaaaatgggcaaaagatgagaatgggcagttgacacaagtgaaaatccaaatggccaagaaacatcagtagatgcccaccctcatcagtaaccagggaaatgcaaatgaaaccacaatcagatgccgtgccacacttttcaaatggaaaaaaatgatcaactttcactgtcccagtagcaggatcactgctagtgagggcgtaaactgattcagctactttggtgtgtgcttttatgtttcatatcttttaatggagagaaggcaatgcatagagtgcacaaatcttttttatttatttatttatttatttatttattttgagatggagtctcgctctgtcgcccaggctggagtgcagtggcgagatctcggctcattgaaagctctgcctcctgggttcatgccattctcctgcctcagcctcctgagtagctgggactacaggcgcccgccaccacgcccggctaattttttgtatttttagtagagacggggtttcaccctgttagccaggatggtctggatctcttgaccttgtgatccacctgtcttggcctcccaaagtgctgggattacaggcgtgagccaccacgcccggccacagtacacaaatcttaagtgtataccgaggtaaccaccacccgcatggaggcatagaatctctccagaacccccactgggttccttcctgccccttcccactttatacctccctcctcaaggtaccgttaccttactgcttttcattacagattcatttaacctgttctagacttcatataatttttggtttctttcattcaacatacctgttagatccatccatgttgttggcatgtaggagtagtttgttcctttgtattgctaagtagtattccattgtgtagatacaccataatttatttctgcattctcctattgattggaatttgaattctttccacttcggggactattatgaataaagctgctagaaatattattgatgtgaagtatagcaactctggtgagcaatttggattctctagttaacttgaaaaagtgtatactctatgacccagcaattccattcctaggaaaatatgttagagaaactttcatacgtgttaagaaacatgagtaaaaatgtctgtagctgttttgttaatagttacaaaaacaaaacaaaataaaataatcttaaatgcccaccaacaggagagtggatcaataaattatggtatagtcatacaatggaattctatatataagtaaaagtaaatgaaatacagcagatcacatcaacatgacttacaaacaatattgagtgaaaaagcaggatgtaggagaaaacatactctcagatgccatttatataaaatttgaaaacgtgtagtacgcaccaccatcacaaagtatggtactatatattgtttaggaacacgtctatctatagtaaaagtacaaaaaaaaggatgttattgataaacagaaaattcagaatgatttgcttcaggtgggaaaggaagcagtcatgaaatgaggggtgtgggggacattggattgatgagcactgaactgatgagtgcttcagttctcaagttggatgattagtatacaggtggttatgatagtctctaaacttgaaatacataataatattttaaagagacagagatggggataattaagggccgtgatgtgctggtaaatgtttgacaattggctgggggagggaagtgatttgtagcatttgtctctttccatggcataaaaactcccaccacggctgatttcaaattgtcagtgtgacatcatctggctcacaaaattcctgaatgtgtaataacagtcagccctcatgagccaggagaagccaactcaggcacaccactcagacactgaatgtgggagcagagtgctctgaaggccagactcagggatccaggctccctgagggctttcccaacaacctaggagatgggtggaaggctggattgtattatttatttattgctattaagttacccctaaagctaagcagcttaaaacaacaaatatttattatcttgcacaatttctgggagtcaggaatcagagaatggcttagctggctggttctggctcagaatctctcatgagtttgtagtcatgatgtcagccagaactgcagtcacttgaagctctgccttgggctggaagatcagcttccaagctcactcaagtgggtgccggcaaaagcctcagttccttgtcacatggacctctccatattgctgctcaagacatggtagctggcttgagagggaggaagagaacaaccaagatggaggttcaaagaattttataacctaatctgagaaatgacataccatcatttgtatcctattattcacataacaccaacattgataatatgtgggagggaatgacacaaggatacagatatcaggtagcaaagatcattggggagtatcttggaggttgaaggtgagtgctggttgtcctgagatgcttgtaatgggttagtggatgcccagagacatgggaatcagagaggccatcccctttgttttgcagctggggaaattgagacattcagagatttactcgagagtatgcagcttttcttggtgagggtcaggagtccagggtcttggtcttgccttggtacccatgagaaacaccaaccccacctctccctccctgacttccctctgaaggtacagatgctgaggtcttagcacatccaaggtcaaagtcaccttgcccaagctctcaagaattcctcttcctccataggtgtttccttacattcttcacagccaaaacaagacaaccctcctatttccacataccctgcccctcccacagaggctgttgttaacacatccctaatagccccaaagagaagcatctgccactgtgttggcattgctggacacaaatccatgttggccttctgaaatcccactgccacttggagcctggtgtcaaactgtttcaggactctgtaatctctcagcaaaatgaaacactgccccaaactggaagcagacatgaggaagttgtgctgccacgctttttcttgctggatgctgtttacatgggttattcagtctatgaaaacgcatcaagttgagcacttgtgatctgtacaattttatgtaggaatactatacttaaatattcataaatttataaattatatgtttacagattcataaatttaaatactgaaactttagatttttaaaaaaatatatttccaaagccaggggcgtaatgtatttggggcctggatagagagaagcattctttctgttctccagatgccatagggaagcgaagcctcagtgacaccatagcatcttctgcagcaagggggcagttggtaatgggaaaataatgggggttcccaaaggtcaggatcaaaaagttcagccctaagtgctttcttctagacaggtcagtgggattggggatgcagggagagagactggggtcaaaccagagccatcaagtcaaagacccaaaaaggtatatactgcttcttttccttgaggatacgccacttttaatccttattctccatatcccaacctgggctccaccctcccagggaccaattcaccatccttctcttgactctgggagccaaaagaccaggtggtgacagaaggaagactcaggctgaggtcctcgggtgggtcagaattttccagttttccctttcctttccaagccaggacagggaaagtcctcccactttgagttccaccctcaacacccatccttttgatgtggaagatacactattgggaggtgactgtcaagatgccaagcagaataggctgaactagtgcaggggtttgccttagtcaccagacagatgggagttcaagcatgggcacagctaatgtcgcaactccagggtccttgtagtggcttccttggtatctctaaatggatctattcccccgggtcaccagccactgcagctagccaggtgatgcagcctggctggaaacgagctgtctctcttgcccatttgcctgggcattgttttgaagccatcctggactagactccagttcccagcccctctctgagctcattgtcctctgacccatcaaggcctgtggtcaggctcagacctagatccccactgatgcactaccccatcccttgtcactgcctctgtgccagtccctgtgcttctatccacttccaggccactttcggcccttcctttgcaccagcagagtcctaagagtgcttcccagtccgtcctgtggtcctgggccccacctgaatcccacagccctgggctagttccctggttgtcccatcaaaactattcatgactggccagccatggtggttcatgcctataatcctagcacttgggaggccgaggcaggtgttttgcctgagctcaggagtttcagacaagcctggccaacatggcaaaaccccatctctactaaaaatacaaaaaattaggctgagtgcagtgtctcacgcctataatcccagcactttgggaggccaaggcaggcagatcacgagtcaggagttcgagaccagcctgaccaacatggcgaaaccccgtctctactaaaaatataaaaattagccaaacgtggtggcacacgcctgtaatccctaatcccagctactcaggaggctgaggcacgagaattgcttgaacccaggaggcggaggttgcagtgagcggagattgtgccaccgcactccaacctgggcaacagagcaagactctgtctcccaaaaaaaaagaaaaaaaaaaaaaggctgttcatgggaagcattttccctgccaactgagatccagacactctgtgaccaggcccctaataacctggggacaaagtgtcaccacagtggcaaagacttgggccagtgataaaatacagaatacgatatgggttggggaaaatgcccccgggggatgtgggggcccccagcccctgcaggtctgacctgcttccacctgtgtgtgctgggcaggcccccatcttatccctgcacactcgctcaggtatgctcatgtggtagggttgtgggaggtatggccttggaagagatgggctgggctggaacgagagctggggcaaccactcccccttcctctgtgactgagattctctcactccagaccgttcactcagcacagaacaggccccatgctcctcctgggtgggaaattgctgccccaccaatctcccagcccagccttcaccagcagcacaccactccccgctgggctccttctgcagtcatactctcccctgcccacaccttgctctcctgcttcctgcctctctctttggtcaaacaccagaaccatttccttatgaagagttgctactgctaatgccaaagcctgggacacattccagagacaccaacacagagccgtgaaggttccaactctctggactctcagggttggaaatcccagtgccctttccaagaggttctgggaacctggactgtacttgaggaatgttgtgggacttgccttttgcacttctggttcctacagaatcccatttttttaaaaggggatttttttttagaggtagggtcttgctaggttgtccaggatagagtgctattcacaggtgtaataatagtgcaatacagccctgaactcctggcctcaagcagttctccagtctcagccttctgagtagctgggactacagacacatgcccagctctactctggggcttttgatatagaataaaggtgggtaagggattctctgatggtccttgttcaaatttcttagaaaatcaccctcaccctctctcagtgctgtgggtagtgctgattcagaggcaaaagtaagactgaatcttacttttgactggaggaccatctcagaatctgcagtgacaaaaacagtgatcccagggagactttggggccccaggctctcagggaagcagcagctccagcagctctctggtgtcacagtgcccagcaagtccctggagccagaggcagggctgtcccctggcactgcctttgttctccttctgtgagaggacagccacacctgcttcaccccatcttacccatgaacagacatgctcagggatgcctaagtggcagggctgagggacagtatggccaagggcctaaagtcttggtcacagaggatcagaggctgaggttcaacatctcaaactaactggagtgtgttccttgtaacccagtcaatcaagatgttgtgaggaaagtgttccaaaatcaaaaccaagtttgagtaacactgcaggctgagaggtggtcacagtgtacattagcatagtaaaagttctgagaagacctgtaggaaatgaacttatttcacttaaatccaagattcctaaacttatttgatcatagactttgcagggggcgggagggtacagaacacatcctaatggaacaccttttatacgttttagaaccactgctcactcagcctctttcttcaccagaaaaggtgtcagggagagccctgacccccactgcacccaccaggtttgttccaggtgtgagcagatgctggtgtcttgttacaaatacagaatctgctgctctgcctatggagtcgccattctgttgtttcttaataaatttgctttcacattattattattattgttattattatcttgagacagagtctcaccctgtcgtccaggctagagtgtaatggcacgatctcagctcactgcaacctctgcctcctgggttcaagcgattctcctgcctcagcctcccaagtagctgggattacaggtgcgcaccaccatgcccagctaattttttgtatctttagtacagatgggatttcgccatgttggccatgttggtcttgacctcgtgattggcccacctcagcctcccaaagtgctgggattacaggtgtgagccaccacgcccggctgctttcacttaaaaaaaaaatgcagaatttcagaccccaccctagacctactaatagaatctgcatgtgatgggatccccaggtgacttgccacaaagtggtttgagaagtacagttatgcatcttctattcttccactaagatgaccagtgggtcagtaccccagccaggtggggcctccaggccccctaactggagtagttgacatatgttgaactgagcacctgtgtttggggaagtccccatgttatgagtccttccttcccaagggaccgtaagaagaactaagggggtctgccagccattgaagaggacttgtttttgcagaggctataaaaaggaccaaggtgctcttccagctctgccttgccaccccagcccagatgtctcttccacagagatgcctgcagactcctaggcatcctgacccagagatggttaccttggggattcaacaagagttgttcctgacaaacccctagaaggaaaggtgagccagcagctagagagaagacattttattgagcctgctacataaatagctacagaaatctgggaggactgaagggagtggctgccatctctctctgcacagatcactaaggaatccatggggagggcattaggggagggcttggtcctccagagggagagaggacaccctgaatgctatctggcatgaggaggatgatgagagagagagagaaagatgagagagactgacagcctaggtgtcatggggaggtatagatgggagccaaacaggtcacagcatttggaagtcactgggtcagagcctgtatcacatcctttaccagcatggtgccaatcaccattttctcgctgttgacagtcagctgggcagctccagctggccgggcatccagggtcagcagaacgaggcttccaccagtcagtgtcctccctgcaaacctgaggtgggaatagaaggggtgaggaagagctgctaagggtgactgtgtttggaaggggatcagcagctggggctcctccttcaaaccagggcccccatgctcatcatttcccctctactggtggcctagtacctgtactcatcagatgtcccacaaggaacacgacccaggttggcagtggcagtcactttctgcaccacaatgtggtcactccgacaggtgtctggcagcatgagtttctctgtgatctcattcatgcccatcagctttcctgggggtagaggtcgtgatgagggcagaggccatggtgggtacagaggccagcacctgggtctgcttactgagcaacaagttctcccaggctgggaaggtatcatgcaaagggcaggtcagaatttaaatcatcagtcttggggagaaggtacttccctctcagactgggccctccctcaggaagcctttgtcagcctctctacccctcccacccaggcctttatccatgttgttaccaaagactgatttggcgcttcctccatcagacatctgggctaccagccccttgagagtggccagtcagttcttaagaggttcgcccatcctgaacctcacaccctttgatctttcctggggggccctccaacccacattcaactcccactcagctcctggaagctaagccctcacaaaaagatcacaggtggctgctgtgatctctcagccagaatccagtagtcacatgcagcattcacaggtacatttttaattgtacctctgcagtagcagctccagacctagccagggctcctgaagcctccaaaccttcacagcacccccagaactcctcattctgcaaggctgacttctctccactcacatgatccaggccccccatgggagctcctccgtctgctctcctgcacaccagcagtcttctcttcagcctctttcctccctccactgcttcccctattcttcacctccttttagaaactgacatccctctcctgtttcttctatccccttcattcatgactaataacattttcttgtttttgttccttcaatctgttcatgttcaagtgtccccgtctccaaaaaatcctttccagaagtgagatccttcatcgtgccaatgccctgtctccctcctcattcatggctaaagtcctccaaagaggactgcatgtacttgagccgtggtctccctcaacccactgcagttggcctctgtccctcctttagcaatgaccctctctccctcaggttggcagtagccttttatatgctgactctgaaggtcttaggtaactgtggtttgcagacaccttctgccttgttgtctctcctggttctcctcccacctctccctgtgctccttctcttatccctcccctcctctttcttctgcagaattcaggttttcccccaaggttctgtccttggccttcctattttctcccacctcccagagtgatctcattcatattcacagcttccattaccacctctatgttcatgactccagcttcaaagtgtttcctgggcatagacccatattttcagttgcatactaaatagctcctcctgaatttcccaaatgcatttcaaaatcagcttatccaaaactaaccatgatcttccctcctcccttgcccaagccactcttctttcttctaggccagaggttttgcaaattacagcctccagaccaaatccagcccaccacctatatggcccacaatgtttttaatattttttaagtgttgggggagcaatcaaaagattaatatttcatgacacatgaaaattacatgaaatttaaacttcagtatctataaatataaatggaaatttcttggaacacagccatactcgttcatttacatactgtctgtggatgtttctatgtttcaacagccacagtcgtgttgtaactgcaacagagaccacatgattctcaaagcctaaaacatttatctttggcccgttacagaaagtttgctgacccctggtctagatgaaggacaccaccattctccctaccatccaagctggacattctggagtcagcttctatacttccctctctgcccactcccagggagcactcaccctgttccttcttaaactcattttcactcatgaacacaggggccatcagctccccaacaggtggctgaatggagacgtagaactgtcgggtctgggtgctgggaggggtgggaggaaacggagaagaattaaggctgtcatctctcccctcacttcccaccctgtgtagaggcacagcttggaggcagtgaaagagtgaggtcaggaatgagggcctgagatggcttccagacccacccaatcatgatgtatccccactaagcaccacctccatttccagttcattgttaccctgtccctttccagcccatcctctcacccccacctcgagttgggcacataccacagctggaagttggctgcctgggttgagtcacagaaattaatgcccattacagcagtggcagattctccaggtgccagggactctgaagtggtataaggcagtgaaggggagagggagggccaccatcacctgataggtctagaacccagcctagccctactctcctctccactgtcacagctgaccagccctctacagaatcttggctttcttggctgctggagactgttcccggtttcctcctgaactctaagcaccctttcccccactcaccctcaccacatttaagttagtcctgaaacaaccaaggcccaaatctgctgctgcaagcacctcccgccctgatgtgaacttgcttatttcatcatctgtcttgtccaccagagtgttgatcatgttagatgctatctctgtgcccctatagcttggcccctggcctggcacaaggagggtatcagcaaccacagaaagactgactctgcccaggagcctcctcctccaccccatccaaagcccttcgcaccaatttcgggaaattcttggatgctgatgccagcaggcagtttgggagtgcccacatgcaggcccttgatgggggtatcagagctgttggagaagtggatgtgcacggacaccatgtggggatccccggagaaaggttggcggctgaaggtgtagtccacagccagcccctcgccagctacccggtgcagcagctcctgccgcccaacacccgatactggactcagaagctagagtggaggggtagggaaggacagaactgagcaagatggagagagcctgtcccagcattgtcccctagggccatccagcagctgggactcaaagctatcacatcctccatcacacccaccccccacacacatccacaccataggatgcagcacagggatgtgtccctgccccagcccggtcccctcctccatcccactcaccgacggtaccagggtggagtctgtgagtgtcaggccctccaggtcagcagccagactggtagacacaattgctgggggagacacaggctggacactgggaggggtgactgtgggagtagataagactatgaggaggcaaagtggaggtggcttgggttgagcagggagcctagggatcaaggagcacgcatttcagcaccatggacagcggggcacatggctgcctggaggctctcgcaaaatacccattcctagacctcaaccccagacctggggaggtcagccctgctgccctctcaggcctgaagatatgttctgtctgctcccctgctcccacaagacctgaggaacccgatccagagtccctatgggctgttctaattcatgctccccaggcctcctttcccctgtgacttttaccacccaaactcacaatcctctagatcaagcagggagatctccttggttgcaggagcacttttgctgctgggaggctgaaagagaaaaatgggatgtgggtgtggggaaggggagcaccttggcatgttctgggttgggtagaagatgtcatgttctgttctggatggtagggagatagatgtctgggcctggcccagaggttggggagggccctggcccatgagcacaccctgactctgccccaaggctctcactgttttcctgctccaggaggcaggttctaactgctcctcctcggactccgatgtcatctcggactctgatgagctactgctggaatcgctgccctcatcagaggatgacgcttctccttttctctctggcaccttcttctttgtcttcctcttaccatcctcctcactctgttcactgaaggagtgggaaaggttggctcaggcctggcctggacactccctccttgcttcacagaagcaggagaaatgctgaaaagctggagtggtgtggggagcctgagccaggagggttcacacctgaggtcctatagcagggaccccgtgagagcttgaagccagcttgtgccagctcaggctctaggactctggttgcttctccacaccagcccatgaggcctcagagatctcctgcagccagcgaaagtaggcgtcatgtgagctgacagccccacccagctcacgaggggctcaggggctcttaggagactggctaaagctcaatgctagccctctttccaggaaagccccctgaaccccaccagccatctggctagctcccttctcacctctcactgcctctccctttctcctcatcctcatcctggtcttcattgtcggactcactgctggactccccagagccgctctcactgctgctcttactgtccgattcactctcagactcagggtctgtggaggaacaatatgaggcctcctccctcatatgcaggcctccttgggtctggagcagacacctgggttccaccttcacattcagtactgaaccctcaaacctctctgacctgcccccagccctacatgccagctggaactgacagaaacacagatggactccatggatagaaacctgcacaagcacacacacctggaacatgaatccctcaggtgcacaaacaattcacaagcaggtgcacacccctagacacacaaccatatacatatacccctcatatagtcagtcacacagatgcatgggcagagcacagaggaccccagctctgccatctgctcaccactgtctgcggactccgtggggcctgactccccctcagagtccgagtagaagggtttttccttctcctttctcttctcccgatttgagcacttggtccattcaggtacctggagatgggggtagggtgcagggtcatttcatcatggttggggagaaggcaggcaggcacaagcccttaccctttattccacctctttgtgaggccctacctggtctgtcccacaaagggaataacagaggaggaagaaaggggcactgtccatggaggggagggaatgctgctcacagaggagcactgccaaaccaaggtggaaacagagtatgggaaggcccaggagcacaacacacaggggaagaagagggacacagacagggcaggggagagagcacacgtcacacgaaggtgggacctcagtgtattcgcccaacaggcccacgtgagtctcaataagggagagatcttcttcctgtgtgtgtgggggagggtgttaggagggctgggccggcactgccagggctccctactgtctgcccccaccaacacacacacacacacacacacacacacacacacacacacacacacacacacacacacttcaaccctccaccccgctgacctccacgttgcgcacagatgggtctggggcttcctccggccagtctgggagctcctggtagcctgtggccttggcattaagcaggtgggacagtgagcccagctggaagtggtcccggtctagggataggtttagaggtcaggcaggtagcagcagtgagggaaagctctgggagctgttttccaggtggggctgggtggtgattctggttgggacttcccaggtgggtaggggaaggagatggatgtgtgccctaatggctcttccaccctgactgcacctttaggcccacatgctggaagaaaaggctgtctggccaggccagagcagggactgagggccagggaaaggcagcctacagaggtgggcaggaggagactctgggcccacagatgctgccgacctgtctgctcagcatgcacgtctagtcaggctctggactcagcagggagggatgaacagtcagagcatgagtgtgtagaagtctggatcagagttgaggcactgctggaggagggcagcacaggcctgtgagtgaggatggtgtcggggagaaagggactgttgccttcttcctgggagaatttcaaagctgtgcccaccctcagaatctccccattcgtgaggtccagggaagagaaaaagaacgaaaagatacccagaagaactgagctttgtgaaggaggctctcttctgtgtaggttcctggcttccactcctggggcccggagaagcagcgggaggacccttccctcccaggcccatctcaaggccgttgtcttgggaaaagaggccttaagggccaagcccaggaacagaggcaaggctgaagccctggggcctgggatttggactgactgtagtgactaagctcacagaatgcaggcaactgctttctcaggacctttataaaaatatacacctctcctttgtgtgttgttttgctttctgccttcctgggtccttggtatttaagatcttggtatgtattccaaagcctagtgtctgctcagggagggagatggaaaagggagcctgagaggagaggaggcacaagtccatcctggccaggaaggcagaccctcaggtgagatgatgctggcagtggttatgggagggtgaaagagtaattcctggtgccacaggagggacaaaaggagtgagccagggagcaggactgtccacagaagcctggtgcctggctaggggcctcaggaaggtctggggcagagactctggccagttcctttccattcccctaggaaggttacccttgatttcagctcccacctttgaaggatgactccaagactggagctggtttgggtgccaggaagagcttcttggcatggcggctgagggccccaccctgctcggaagggacgatgagctgccgggtgaagcgcgcccggtcgcgaatatcatagttctggtcatatttggccagactcagcacatactgggtcagcagcttggtctggaggaacaggaagaggtgggtcagctgacggggggatggggacacaggaggctcagaaacagattctttaagccgacactttcaggcagaacgtctcctctccctgcttaggaccggcgcttccacccagctgtccctccccacctgcccttgttctgggctcagaattttctctcatctctctggacatgcctcctgatgatcccaactttgacaactgccttgggccaacaaaagaggttttccttttggactttccccactcctggctctggactccattcttccctagatttgtggtccctaccactccaggcctgtccagcctctttactctagggcagcagggtatgtggaagtatggaatgctctgctggacctcacagtttccaggctccaccacccagggggaattagacaacaaaaagacagggcagataaacaggggtccctttggcaggggccaccctcatgccctatccacccatttagtagattctgagcagcccaggggtctcagaggtctttatccttccctggaagcttctaatgacatcagggcaaactgcagctgcccatgcatttgccaaggtcatgtagggttcacagtctgcagtcagggaagctacaactgcagacctaaaatatctccatttctgccatgatcttggcctaatctaacctgccttaacatggcaacagcggtagcagccatcacttatcaagtgccttctggcaccaactctgtgctaggtgctccacactagctcatctaatctccccaagccttctgagaagtaggcattattgcccccattttacagaaaagaagcaggatcattaaggggcttttcccaggccaaggagcccatcagtactgcacctaggcctgcatctgctggagctgcaccccatctgcttcccttcactgcctacctgctgacataaggagcctgccctggcccaggtctccatgtttccatcacttgtgaccaagatcaaaaccaccaagtggtcaacaagcagaatgcccaagggcatcaggggccggcaggagggagcctggaactgactctgttcttcctgaggtttatggtgacatactgttacgtgtagccttggacatggttaacccagctaatctggcagggacatcaagcagatgtccataaggggcaaagcccctcagatgctgacccagagtctgagcagctgctttggcagaattgccccacaccactctagagagccactatgattccacattcctacctccaatctggcccacaggccctcttcagctcagtcccttccagcaaagcagcacctgcgatactgttatagtcacagataagcaatcccaatcccatgcaccgctaatagaatagacttaaaaatatgaaaataagatgccatcacaacagatttcatcaccaacctgcccctctcttggccagacaccatctaaatggccagggctagtggatgcccttaccaacatagtcaattatcaagaggctgctgatccctcttttggtttggacaatgtcttcctccacagatttcccagctggctgatcacagactccctccttcaagtccttgcctagttctagaaagaactgtttggtatttggatccatctgtccacagccttaactgcatgttaacaaccaacacaggaaggggctggcccaccacctcaacactgcaggatttgcctataataattcattacccttctccaccccaaggggccattccctgtggattgtggcatcctgtgtgcaccaccaagacccccacctcatctagccaggatgtgcaggaattacaggctgttcaagaaggcctctgagatacactccagtgtgccaagaacagaacaaggctccccctcaccaacaggctccagttgtcagagaggaattttaagcaggaaacactgacttcctttccataacctatgccaacatacatgctaccttgcagatgcctgctaatcatgcttagaaaactggctgttaaaaaaaattgaaatatatcctcaattcacacattacacatgagtaagtttaagctctagatggatgtggcagacagattctaaggtcttccccaccagtagctgcctcctggtgttcatgcctttgtgcaatccctcaccttgggtatgggcaaaacctgagacttgcttctaaccaacaggatatggcaaaggtggtatatgactatatatgatcctatgattatgttttattaagaagactctgtattggaagttctatctagagcaatcagacaggagaaagaaataaagggtatccaaattggaaaagaattcaaattatccttgtttgcagatgatatgatcttatatttaaaaaatcttaaggattccaccaaaaaactattagaactaataaattcagtaaagtcgcaggatacaaaatccacataaaaatcagtagcattggccaggtgcggtggctgatgcctgtaatcccagcactttgggaggccgaggcaggcagatcgtgagatcaagagattgagaccatcgtggccaacatgatgaaatcctgtctctactaaaaatacaaaaattagctggatgtggtgatgcacacctgtagtccgagctactcaggaggctgaggcaggagaaccgcttgaacccgggaggtgaaggttgcagtgagccaagatggcgccactgcactccagcctggtgacagagcaagactccgtttcaaaaaaaaaaaaaatcagtagcattgtccaggcacagtggctcacacctgtaatcctagcaagcactttgggaggccgaggcaggcagaatacctgaggtcaggagttcgagaccagtctgaccaacatggagaaaccctgtctctactaaaaatacaaaattagctgggcatggtggtgcatgcctgtaatcccagctactcgggaggctgaggcaggagaattgcttgaacccgggaggcagaggttgtggtgagtggagatcgcgtcactgcagtccagagcctgggcaacagagtgagaactccatctcaaaaaaaaaaaaaaaaaaaaacccattgcactccagcctgggcaacaagagcaaaactccgtctccaaaaaaaaaaaaaaaaaaaaaaatcagtggcttttttttttttggcggggggggacgaagatgaagtctcgctcttgtcccctaggctggagtgcagtggcgcgatcttggctcactgcaacctccgcctcccgggttcaagcaattctcctgcctcagcctcccaagtagctgggattacaggcacccgccaccacgctcagctaatttttgtatttttagtagagacagggtttcgccatgctggccaggctgctcttgaactcctgacttcaggtgatccaccagcctcggcctcccaagatgctgggattacaggcatgagccaccacgcctggccgtgaattcatttttgacaaaggtatcaagaacatacattagggaaaggagagtctcttcaataaatggcgctgggaaaacgggatatccacatgcagaacaataaaaccagacccctatctctcaccatatgcaaaaatcaaatcatagtggattaaaaacttaaatctaacacttcaaactatgaaactaataaaagaaaacattagagaaattctccaggacattgtactgggcaaagatttcttgagtgataccccacaagcacgggcaaccaaagcaaaagtagacaaatgggatcacatcaagttacaaaggttctgcacagcaaaggaatcaacaaagagacaagccacagaataggaggaaaaaatttgcaaactacccatctgacaagggattaataaccagaatacgtaaggagatcaaataactcaataggaaaaaaaaattcaataatccaatttaaaaatgggcaaaagagctgaatagacatttctcaaaagaagacatacagatagcaaacacgtatatgaaaaggtgatcaacatcattgagcatcagagaaatgcaaatcaaaactacaatgaaaggccaggcacgggtggctcatgcctgtaatcccagtactttgggaggctgaggcaggcggatcacctgagatcaggagttgagaccagcctgaccaacacagcgaaaccccatctttactaaaagtacagaaattaacggggcgtggtgacgcacgcctgtagtcccagctactcaggaggctgaggcaggagaatcacttgaaccacagaggcagaggttgcagtgagccaagatcgcaccactgcacactccagcctgggtgacagagcaagactccgtctcaaaaaacaaaacaaaacaaaaaaagatatatcatctcaccccaagtaggcttatatccaaaagataggcaataacaaatgctgacaagaacatggagaaaaggcaacccttgtacactgttagtggaaatgtctggagaacagtttggaggttccttaaaaaactaaacataggccgggcacggtggctcacacctgtaatcccagcactttgggaggccgaggtgggtggatcgcgaggtcaagagatcaagaccatcctggccaacatggtgaaaccctgtctctactaaaaatacaaaaaattagctaggcgtggtggcaggcacctgtaatctcagctacttgggaggctgaggcagaagaagaatcacttgcacccaggaggcagaggttgcagtgaggcaagatcacgccattgcactccagcctgggaaaaaagagtgaaacaccatctcaaaaaaaaacactacaaataggccaggtgcagtggctcacgcctgtaatcccagcactttgggaggccgagtcgggcagatcacttgcggccaggagttcaagaccagcctggccaacatggtgaaaccccatctctactaaaaatatgaaaattagccagacttggtggcgggcgcctgtaatcccagctactcaggaggctgaggcaggagaatcgtttgaacctgggaggcggaggttgcagtgagctgagatcatgccattgcactccagcctgggtgacagtgcaagactccatctcaaacaaacaaacaaaaactaaaaatagtgctaccatatgatccagcaatcccaatgctatgtatatacccaaaagtaaggaaatcaacatattgaagttatatctgcacacctacgtttattgcagcactgttcaccatagccaagatttgaaagcaacttaagtgtctatcaacagacaaatagataaagaaaatacggtacatatgcacaatgcagtactataaaaaaagaataaaaaagaatgagatcctgtcatttgcaacaacatggatagaactagaggtcattattttaagtgaaataagccaagcacagaaaaacaaacttcacatgttctcacttatttgtgagggctaaaaattaaaagaattgagctcatggagttggagagtagaataatggttaccagaggctgagaagggtagtgggtgggggaagtggggatagttaatgggtacaaaattatagttagatagaatgtgtaagatctagtatttgacagcacaacagggtgactacagtcaacaataatttattatacatttataaataactaagagagtgtaatttgattgtttgtaacacaaaagataaatgcttgagaggatggataccccattccctgatgtgattgttatgcattatatgcctgtatcaaaatatctcacataccccataaatatatacacctactatgtacccataaaaattaaaaaataaaaagaagacggtcttgctagcagactggctctagagactttctcccttgtggctttggagaaattaagcatccgtgttgggaggcccctatggcaatgagctaaggacggcctctagaaggcaagggcagcccccagctgacagccagcaagaagccagggccacaatcctacaactgcaaggaagtggatcgtggcaccatgtgacttggaagtggacctttccccagtacagcctccagataaaaactcagccttggctgacacctcagttgtagccttgcataagatccaactaagccatacctgaattctcgacccatagacactgagaaaataaacgtgtgttgtttgaagccaccaaatttatagtaatttattatgtagcagaaaactaatacaattgatttaaaaatgtgaaagtagaaaaaaatttggaggaaattctttttaatttttatttatttttgagatggatcttgctctgtggcccaggctggagtgtggtggtaccatctcagctcactgtaacctccacctcctgggttcaagcaattctcctgccacagcctcccaagtagctgagatttcagcgcaccaccacacccagctaatttttttgtacttttagtagagacagggttttgccatgttggtcaggctggtcttgaattcatgacctcaaatgacccacccaccttgggctcccaaagtgctgggattacaggtgtgagccactgaacccagcctggagaaaattctaagtgaaaagtttaattgaaatgtgaatggggaaaaaaaagtattaaatatgaaagcattgaaaagaagcagaaaagtttaaaatattggacaatagacaaaagtacaacttctgaatgactatatataggaataaaaaataaggaaatatataattaatggtggtcttctaaatggtggacttattaatagtttaaacttataattttctgagttttccaaatgttctatgataagcatgtattacctttagcatattaaaaaaagtttacgtttttaaaagcaattctgcaaaatttgtcagaatcttctattcactgtaaaggcggtcacatgggagggttgtagatcccactgtgcccctggcagaccctcctgccacacatctcacctgacacataaaagcaaactaacctgctaggcagtttccccagggtctatatccaggtggatgtaatagccactttgattaccaacccccccatcccccgccacctgcatgttatgcctttgtggcctctggtctagtatctgattatctgctgatcaatagcagggcagaggcctcatcttggtcatttccttggcctcatcctgggccaggatctggcatgccgtgggcccatgtccaaattggagagaatgactgagattactgtggccttttagctgggcagattgccactcatggtcccaggatgggaagcatcactactgttttgcaagcatggtcatgtgcgcatccaaaccacctccctcctagtaccccaaggactcccccttctttaccactcccagaagaggctgggaagaaaggagaaagaaagggaggacaaaaatctttattgaatcaaataaccattctaaggggcctgcaaaaactcacttgcaggtgaagggcgccctggaggtgagtgtccatttgcctgaacagcctactctgggttccctgacaggggtcattcctaggggagggttcagctgtatatacccacagctcgctgtgccaaccctgatgacagctgttactgctgtgtttaaaatgtttatttttgtcctgtttctcctacttggctgtgagtatctggagacctgtaaatgtgtctcactcattgtcatatcctcaggacgcagcacagtaccaggcaaatagtaggcctacatgttaaataaatgaacaaatgcacatgtagctcacagtaacaacttgggggaaatgacatgtggacaggcccaggcttatgaaaacatgccaacctcaccatcctggggtttaggactctggctcagtgctgagcatgtcagactcccacctacatatatgttaaataaatgaacaaatgcacatgtagctcacagtgacaacttgggggaaatgacatgtggacaggcccaggcttatgaaaacatgccaacctcaccatcctggggtttaggactctggctcattgctgagcatgtcaagactcccacctacctgggtggctccccacccaggctgcttcatcttttcaaacattcctcccacttgctccttcctcccacctgaacaaaggaagtatacaaatattttttcaacgattgaacgcttccccatggtgctctttctccctctaacttctctctctccccctctaacttctctctctccaatctgctttgcccacaacactgataacaagctcagggtcacatggtccagtgtctctcctccttccacctgaagacctaaggtttggaagttacttttgataaggctagcatatttaattatacagactcagttgcctccacatgttgctgctgtcctttgactcctgattacagtcacagcacttggtggccctgcctacctcaccttgagcctctggggctcactctggccacaatggatcaaagaagccactgaaaaagataagtgccaccatccaaagactcccacgcacagtggacatggcagggatgctacagtctccaggggatatccctgctataaatctgtagaccccagccacctagccagaggttttgcttcaaggattggcagagtctttttataaaagggccagagaataactattctaggctttgtgggcaatacagtctgttgcaactagttaaccctgctgttgtagcacaaaagcagccataggtaatttgtaaatgaatgagcagggctgtgttccaacaaaactttattacaaaaacaggaataggccaaattcagcctatgggcagtagtttgccaatccctgtcctgcttaactgagtgggagagtgtggaaatcgtcatggtgtttgatgtccctgacaccttgaaaagctcagcacattatgcttcattttaggagaatctcctggaaccatctcaggagatgccagacagctaggaggctctgaacaccctgatactacaacttagttgagcctcatccttggctgtgtatctcttataacctttcaccttgggaatgacagtggccaccagcaccacccaagcccaagcagagactcacccccttatctttggcacagactggccaagcattgtcaagctttggaaagaagcacagaccacatctgggatgcatgttctcccatcagtacctgccactgttgggcccttcccttatcccaatcaactgtggttcttcacagccccagagttccaaggtggcagacaggactcttgtactagcagactggaggtcacagcttcataggagagtctcttcaacagtgaccaccagcactacaaggtctttgtgggcactggggtagcattggttatgtgggcagaccagccaccttccctgattcttcttttccaaaataggagctagagttcagccctgcctagggagggccaaaagaatactgtctagggagtttctggggaccagagtatctggggggtcatctcttaatctttacctgtttagagttggtcaggtagagcttggctgccaggttgatgacctgcagcttgacaatatcctcctctgctgtgaatgacttggccatttttcttaagacatcaggtgcaatcctggggacatgctcacagtactctccgatgagccacaggatgctggctcgggccatgggcacctgtggttgtgggagaggagtgaagatgggtaaatacgggaaagtgggtgggtaggattgtggacttccagggaaacagcactcctcatctgtgctggcctgttgtattatgggttctctggaaatgggagttgggggtggtgagatagagagaggttaaaaggtagacatttcctagacagcatttcccctcttccctagggcttcattagcatagagctttcaagaccctaagtcagtcatgatgtaaaagattgattttctggattcattgtaccctcagtactttatttccatgttactctccagaatctttgggaatgccttgtttagatgtttcagcttagcagtgcgatagaaaaacacaagatttgtcactcaaccatggttggctagagctttagagagaaaacaagagtagtagtaaagtccatcgtgctcattgagggtctccaaagggaaagcaaatcaggggtaacaaggtcagggtcacatggtccagtgtctctgctccttccacctgaagacctaaggtttggaagttacttttgataaggctagcatatgtaattatacagtcttgaaatcatggggaggaccttgaagtggggagtgaaaatatggcttctccctcacctggatgttgtctgtaagctttgccaagtgtttgatgatctctccatgttgtgctggctgcatctgtagcaatttcttaatgacgaccactgactctgcaaccacaagctctacagaacaaaaatgagtgtgtggaccccaagacagtcagatggccacactcaggtggacagacacacctgcagtgccccaggcccttggctctttctctcaacccccttcagttctctagcagccctcagaggtgtaggaacacttgggccctgatcaagacagacagaccaatggatacacattgtgtctaggcagactggtggatatccagtggccagcagagtcagacctgcaggcagacaccctctgatcatcacggttagacactcagggaaacactgaccatcacggttggacagcagctgcaccaggccattgaggcaggtgtcacggactcggccgatgttagttgcacagcgtccaatggcctggattgtggctgccacaaagtccttgtccatgctgcgaatataggtctgtgggatatgacaaagaaatccctcagtgactctgcaggcttgagggtgaccttcaagaaggctgtggcctttcattttatggcttatcatgccggtgactaagacttgggaaagggggtgacaactccacccccaatccagtgattccttggcccaaagccagccaaacacattggaacgggaatgtaagataatagtttctccagccttgggctcataagaggaggtttacccaccagggcacaaggatctgatgggcccctctcccaggcccttctggctgggagctggcctgtacctggaattcccgtaggacagtaggaatgttggtctcattggccaggttggtcagcacttccagctgcagggagggttggagaggcagaaaatgggtgggttggccagtggactttctgtgctttcattccaaatacacttcatagaccagaaaacaatcctcatgacagccctgcatcatcctcacactgatgagggaattgacaggttatgaaacttgtctaaaaagcaagaggaccagtttgcctcttaagtggattccctacacagtatgcttacagtatgaccatgtcacctccctactgcattgaaaacttaaagcttcctattgctttcaggatggagaccatcgtattcaccatggtctgtaagtccctgaatgatctgcttgctgtctacctcccatctcccatcactgtcccccttgtcttccaggccccaatcccactccacttcctaacccagggtcttcgcagatgctgtttcctctgcgtggagcagttcttcccatttctgtccctgcataattcatgttcatctctcaggcttcagctcaagtctcatatcctccgggaaaacttccctggcaccagactagatgaggtctccctattttatgcccttatagctctccacactttcttccatattttgtaagtggacttttacatttgccttgtgattaactgcttaatgtctcctcctccccacatctgtaagctccacaaaggcagggtccctgattagtttgctcatcatgtacccctagaacatagtggatgttcacaagggttaggaagattaactgttgctgaaggaaatcactcaataatgaggcagcagagcaggaatcaaatggaggtatgggctcccgccactttccttgtccgtgaatgtttgcaggagagcctgagggggcaggtgtgtgggggccataacactgtgggtgggagagaaaagtgtgaaccttggagtcagcagaattatgtgacctggggcagttacctcccagagtctttttttctttttcttagattgagatggagtttcgctcttgtcacccaggctggagtgcaatggcacaatctcagctcactgcaacctctgtctcccaggttcaggcaattctctagcctcagcctctcgagtagctgggattacaggcacctgccaccacgcctggctaatttttgtatttttcgttgagacgaggttttgctatgttggccaggctggtcttgaactcctgacctcaggcgatctgcctgtctcggcctcccaaagtgctgggattaggcgtgagccactgtgcctggccagagtctatatttttataaaaggaatataatgtacacatcctgggattattatgaggtgatatcaggttacttcatttatgaagagtagcaggtgtataccaggtactaggcaaagagcagttcccttctccccctgaccctccttagcccagctccctgaacaaacagctccagctggggcagtcatgggctcctgggctcagccccaggaataggcaggcaccaggggggccactgtgagttatttgagtgggtacatggggtggggagggctgggaagcacatgcacttctgtccctcactcaccttcaggatcttaatctgggtggggtcggtggacctgatgtagaagctcttcaggtagggctcaaacataccctggcacaagagaggcagctagggagctccaccgaagccccaggcctgcctcgctgcccagagacacccctcctatcctgacccagcgcccaggatccttgcctcctcaccactgccctccactcctcaagtcttccctcgtccatctcagatctgactagctctttttccactggacatcccctcagcggcccctcaggatccaggccctgctccctatctgtatttggagcctcccctgccccatcctctgcacagccagggtattcctccatcttccctttccccggccccggtcccagccccgacaacgcctccagtgcccgcagaagcggccctcggacagcgaggacagcccgccgtcgcaggctcacccggcgcttgatggacatggtggccacgttctggagcacaacgtactgcacctcactgcggagaggacgggtcagagcaccccgggcccctcggttggggcaagggtcagcggatgaggggaaaaggtggggcaagtcgttgcggggagaggaccagtgcggagggcaggactacggtcagtgtggagcgggtgggcagaggtggaagcggctggtgggcgtgagggggcggagccgggcagcccgtggggcggggcaggaggcgagggagggggcggggctgggggcggagcgcacctgtggctgcgcagcaggcgcaccagcgccttggcgatgacgcccacttccgccttgggcgccaggtggaagtagagctgcgccaccgccatcaccaccgcggcgctgcggctctgcagcaggggtttggtgttgcgcagcagcagccggtggtcggggtccatgacatagggctttcgggagggggcggccgcggcggccgtctcctcagaccccgcgcccttggcctcgtcctcctctgagccgtagaaggctttttccgcgttctcctctagtagggattcctggacggggagaccgacgggtctgtgggcgcctccccgggacacacttcggcccgctctgcctgggctgggcccacttacgttctgggtggggctcaggaactgcgtgcgggcgtagcgggtgagcatgctgatgatgaccacctggccccactcctccacgtcgatcagcaggttacagagtttccggtagtttttgtgaatcaggtcgatgcgctccgggcagacctcctcaaaggccatcaccacactgcccgccaccagctggggaaagaacaaagacgagagggtgaacgcgaagggtggaaggccggctgccggtcaccacccctcccggagcgcccctatacacgcaccgtggtcttgtcagccagaagcttctcaatgacttctatcagctgatccttctggtcagagtccaaactgagggagaaatcggtgaggggaatttgccactctcagccccagccttcccaatatctgtccaagccatgctcacctcctgcaccccagccttattgttctcctccatctctgtcagtcccccaaactaccctcctcaaaccctctgagaagcagcaggcaagacttaggaaaggccaggggtgggttgagaacttaggaaccagcctcctggggagcgtgggacagggctggggcatacctgtagagtttagggatggcgtgggcagctgttttccgcacatagggtgacatgtccgaggcggcttccttgatagctagcatcatgatgggcactatgatgggcacacggatgctagagaggacacggagggcactggcacgaatcagctggttgggatcctaaaggcagaggtggaggcagagctatgaaagggcaccaggtgccctgatggggggaggccacacctttggaagtcactgtccccagcgaccactagctcttgcttccctgccgcttgactggagcctggatggtgtgccagtgatgggtatctgggggacacttaattttggctctggttgcagaaatctgacacctgaacaggtgttgcaatgggtagcttcacttccagaaacactgaaaaactttcagaacacctaaaattgctgaaacacctgaaacacttcctgttccttgtaagggtttttttggaggtgcctgttttaatgcctgaggtgaccgcccagcagatgcaagctggtctcccttccggagttcaaccttacactcctttctcccagaaatcattgcaaaagctgctgttcttccacagtgtttaaaacaaaataggggtgtaggcccttcctttttttttttttttttttttttgagatggagtctcgctctgtcgccaggctggagtgcggtggtgcaatctcggctcactgcaacctccacctcctgggttcaagcgattctcctgcctcagcctcccaagtagctgggactacaggcgcgcaccaccacacccagctaattttttgtatttttagtagagattaggtttcgccgtgttggccaggctggtctcgaactcctggccgcaagtgatccgcccacctcggcctcccaaagtactgggattacagacgtgagccaccacgcccggccccaagcccttcttctttattcctactgcatcctatacagaacgtataaaagcattccttacactgtattgtgatcatggggcttaggactgtcttcccactatcagcagcagcagctatatattacaggcatacctcggagatattgtgggtttgattctagacctcaacaataaagcaaatatcgcactaaaacgagtcacataaattttttgtttcctggtgcatacaagttatgcttatagttacagctgcttgggaagctgaagtgggagaatcacttgagcccagggagttggaggctgaagtgagctacatatgttcatgccactgcactccagactgagcaacagagtgagatcctatctccaaaaaaaaaaaaaaagttatgtttacaatatactgtagtctactaagcatgcaatagcattatgtctttaaaaaaacaatgtaggctgggcgtgatggcttgtgcctgtaatcccaacactttgggaggctgaggtaggaggattgcttgagcctaggagttcaagaccagcctgggcaacatagggagaccccagtctctacaaaaaaaaaaaaaattgaagtcagtcctcttaaactctgcctctgctttatcaactaagtttatgtaatattctaaatcctttgttgtcatttcaacaatgttcacagcatctgcaccaggagtttttttttttttttttttttttttttttgtaacggagtctcgctctgtcgcccaggctggaatgcagtggcgagatctcgggtcactgcaagctccacctcccaggttcacgccattctcctgcctcagcctcccgagtagctgggactacaggtgcccgccaccatgcctggctaatttttctgtttttagtagagacggggtttcactgtgttagccaggatggtctcgatctcctgacctcgtgatccacccacctcggccacccaaaatgctgggattacaggcgtgagccactgcacccggcagattccattttaagaaaggactttctttgttcactcataagaagcaagtcctcatccattcaagttttatcatgagattgcagcaattcagtcacatcttcaggctccacttttaattctacttctacttctaggtagaattccaccacatatgtagttacttcctccactgaagtagtgaacccctcaaagtcatccatggagtttagaatcaacttcttccaaactcctgttaatgttaatattttgacctcctcccatgaatcatgaatgttcctaatggcatctataatggtaaacctttccagaaggtttctataaacctttccagaaggttttcaatttactttgtccagatccatgagaggaatcactatctatggcagctctagccttacgagatgtatttcttaaataataagacttaaaagtcaaaattactcattgatccataggctgcagaactgattttgtgttagcaggcatgaaatcattaatctccttgtacctctccatcagagctcttgagtgaacaaatgcattgtcaatgagcagtaatattatgaaaggaatctttaagcggtaggtatcaacagtgggcttaaaaaattcagtaaaccataactgcaaacagatgtgctgtcatggcactgttgttccatttatagagcacaggcagaggagatctgccataattcttaaggaccccaggattttcagaatggtcattgagcactggcctcaacttaaagtcactagctgcattggcccctaacaagagccagcctgttttttaaagccaggcattgacttctctctaggtaggaaagtgctagatggcatcttcttccagtaagaggctgtttcatttacattgagcatctcttgttgaacatagtcacatctatcaatgatcttagctagatcttctggacaacttgctgcagcttctccatcagcacttttgcttcaccttgcatttttttgttatggagatggcttctgtacttaaacttcatgaaccaacctccactagcttccgtcttttcttctgtagcttcctcacctctctcagccatcatagaattggagagatttaagacctgcctatgaattaggctttggcttaagggaatgtggtagctggtttgatcgtctatccagaccacttaaattttcctatatcagcaataatcctgtcttgctttctttatcattcatgtgtttactggagaagcacctcaaacttctgggttcaagtgatcctcccacctcagcctcccaagtagctaagactacaggtgcgtaccaccacatcaggctaacttaaaaaaattttttatagagacggtcttgaacccctggtctcaagtgatcctcctgcctcggcctcccaaagtgctgggattacaggtgtgagccaccacgcccagcctggagtagcacttttaatttccttcaagaacttttactttgcattcacaacttggctaaatgtttggagcaagtggcctagctttcagcctatcacagcttttaacataccttcctcactaagcctaaccatttctagcttttgatttaaagtgagagatgtgtggttcctcctttcacttgaacacttagaggccattgtagggttattaattgatctaatttcaatattgttgtgtctcagggaatgaagaggcccaaggtgaaggagatgggggaacagtcagaacacacacaacatttattgattaatttcactttcatgtctgagcatggtttgtggcaccccaaaacaattacaatagtaacatcaaagatcactgatcaccataacatataataatcattaaaaagtttggaatattgtgagaattaccagaatgtgacagaggcacaatgtgagcacatactgttggaaaaatggcactgatagacttgattgatgtagggttgccacaaaccctcaatttgtaaaaagtgcaatatctggcaatatctgcaaagtgcaatacaatgaggtgtgcctgtactattactcttagagaatgacgggaatagaacactaaagaagggtagatattaccctgactttctgaaatggaaaaagacaagacaagatcctcacaattgcaggtaaaattgatgctaattcctgacaaaattctggaattgacttttaaacagatgggttagaaacatttattgaaaaggaaggagtctctgttttcttagagacaaatagtcacatcatctgcttaaacctgttttccttttttgtgtgtgagcattttatttgggaaatgattatagattcacagaaagttatcaaaaaaaatgtgttttcctttttgatggggtaactaggccggtggatattagtatcttgatttcagtgatatgtttgtggaagtctcatagcatttcctgcattgctattttttaggtaggccttttgtttcacctaatagccaagcatttttaagagcagaattcacatctgttttatctctgtgtcacccacaaccctttgcacatgaaaggtgttatttatttatttatttattgctattgaataagatccttcctaacaagatagaaaaatgccagctgtctgtacagtcaggtgggtctacaacgtggtgaaatatacttggagaaggtttattaacagatcagtgtcaacctggaaacatgctatgcctcagtcttttgccctggtccaaatagcttatcagtatcttgaaagaagacacaaaatcaggagggacataattaagattcagaatcaccctggtttggaccctgtgctaaactgataaaatgaaatagagtagggtttcatagggggttcaagggaccaactgtacaaagacaggatgtagggagacctggattatctgcttgccagtcagaggtttgattccatgagggatctcctaagaaagtgaacacggccctagcctgggctaggattgaaagaagggagaaggctggattgaaatgattggttccaacatgcaggagagaccaaaagccagtgacaacaaaaaagaaaacaagttttaaaggaatacatatgtagtacgatgacaccatttacaaaacattttatattgcttaacaatatgcaaattactagcacaggaataaatacatacctatgaatgataaacaagagaagatatataggaggctttggctatttgagaaatgtgtcatttcttatggatattcattatattattctttatgccttttgtgaacctgtagtaaattttattttattttttagatacagggtctccctatgttgcccaggctggagtacagtggctattcacaggtgcagtcataatgcagtacagcctgaaatcaattttttttttttttgagatggatctcacactgtcgcctgggctggactgcagtggcacgttctcggctcattgcaacctctgcctcccgggttcaagccattctcctgcgtcagcctcctgagtagctgggattatgggcacccgccaccatgccaagctaattttttgtatttttagtagagatggagtttcaccatgttggccaggctggtcttgaactcctgaccttgtgatttgcctgcttcggcctcccaaagtgctgggattacaggcatgagccaccacacccagcctgaaatcaatttttaaaaattatagttgtggaggtttcaacaaaagagaatggtttaaaaaacaccccaaatagtggtagttgtcttgagatggagcaagttgccttatgaaggagtgaggtccctatcagaaaagatgacctgttagacatgttctagagcaaaggctggcatgctacagcccttggataaaatctgtctattgcctgttttttatatagatttattggaacacggccacgcccacttgtcaatggctgcatttgcaccataagggcaaaattgagtagttgcatagttgagactataaggcctacaaaacctaaaatactatttggcactttgcagaaagaaattatcacattgagttgaactaaatgagctctggttttctaaaagggggacagggtcagttggtagagactataggtgaaaatctgtacaacaatttcagattagtttttatacttaacccttactcaaaccaaaagattacttgccaatctaagacggattccatggttttgacttataaaaagaaatctagcacaatgtgtggcatagagacacccaagtatttactaaatgaatgaattgtatattcaagtgaccatgctttctactctcaccccaaagaagccgactgtcaacccctcttgctggccatagcagattggacaaggggtgggccctggatttgagcagcaatcctgtctacccagcaacctacagaacttctggatatgaaaagatgagctggacctttcacaatctctctcacagaaatttgaactaaaagtatccaggctaggagtattagctcatccctgtaatcccagcactttgggaagctgaggccacttgagcccaggagtccaagaccagcataggcaacagggtgaaaccccatctctacaaaaactacaaaaaaattagccgagcatggtgatgcaggctgagtagtcgcagctactcaggagacagaggtgggagaatcacctgagctcagggaagtcgaggctccagtgagccatgattgcaccactgcactccagcctgggcaacacagtgagaacctgtctcataaataaataaataaataaaggtatgcaaaaatagaggagttaatggttgtaatcagagctgaaaaatccaatatggagagaatggccttgaaatggctgtctttaccctcaagatgtcttagactaaccagaaaagcccttaggggggagacttatacatgcacctaacatatgtaaatccaactagaggccttgggcaaaatgaaacaaaaggtgagaatggtgtgggggattcaggccactgctaaaggttgaaatctacctggctgtggaccacaattcacacctttacacaaaggggggtgagggttgaggggttctccattgctagagactctccactctccgggggctcaagtggttcatactagaagcagccattaccacaggctcctgggaagagagacaggggccctgggtacccacttcatctcttacgccccttctgagcccagcttccactctctgagggtctggctggcctcttctgactgtgaccctcccaattttaggcaggtaggaaggggtctgcagagcccgctcccatgctcatggcctctccccaggcctactcctccgatacagcgccaacgaggcccaggccctgggaggcaaactgagacccctgacctttaggccacgttggaaggtggagatggacagcagggccaggtcttgctgctcctcagcgtagcgtaccaggtacacatagacaagcttcttcaccttggggagagcacgtttctcagcagaacgcttctcagcaggcacctgtgcccacccccctacccctgggatgtcatctccccagccagctgcggtccatggggacaaactctcccagtgggggagagcacccctgagtgtatccgggtcctttaccttgatccacatccagttcagggacatggagacagtgtcttctcctggctcagagacatttctcagcaggtcgggcccccaggggctaaatcatttccttcctcaccccaagcttgagtgtggtcctgggggaggtggggacaagcaatccctcaccaggtagtgctcacctctatgttcttacaggccacgttcttcaccaccgcgggaaacaggtctgaagcattctttcctcgggcaatcatctgggtggtggggtcaaggtaggggaagagggacaaagcgagaggcacagcactaactagagggaaggtctacaaggagctaaggagagctgctcttggccacccaggccccgcccggagggaggcctcctccttcccctcttaccgccacaatcctcttcatggcctccagcttgagagaatccttgttggtgtccagcatctccttcaggtcatcatgcctggtgggaggtacaagaagtcagctgagggcacaagggtggggatggggtattaatcaggagggtccaggcacaaagaagggacatggccaggggaggctcaggcaggacctgacccgaggagggaccagagccagggggaacaagtaaagtacagatcaggggaaacatgtggccagctaatattgtgggttgaactgtgtccttcctaaaaaggatatatttaagtcttaacccctagtacctcagaatgtaaccttatttggaaatagagttgttgcagatgtaattagttaaatgcaatcctactctaatagagtgggtctctaatcccatgtctggtttcccataagaagacagccatgtgggctgggtgtggcggctcacgcctgtaatcccagcactttgggaagctgagacgggaggatcacttgagccctggagttcgagaccagcctggcaacatggtgaaacaatgtgtctacaaaaaatagattaaattgaaattaaaaaaacacaaaaaacaaaagacagccacttaaagagacagacacagggagactaccatgtgaaggcagacgattggaaagatgcgtctacaagccagggaatgccagagactgccagcaaacaaccagaagctagaaggggcaaagaaggatttccctatgggtttcagagggagcatggtcctgccgacaccttgagttcagacttttggcctccagagctgtgagacaattcatttctgctgttccaaccaacccaattgttgtacttttttttttcaattactaaactttttttttttaattatacttttaagttctagggtacatgtgcacaacgtgcagctttgttacatatgtatacatgtgccatgttggtgtgctgcacccattaattcgtcatttacattaggtattcctcctaatgctatccctccctcctcccccaacgccacaacaggccccagtgtgtgatgttccccaccccgtgttcaagtgttctcattgttcaattcccacctatgagtgagaacctgcagtgtttggttttctgtccttgcagtagtttgctcagaatgatggtttccagcttcatccatgtccctacaaaggacacgaactcatccttttttatggttgcatagtattccatggtgtatatgtgccacattttcttcttctttttttttttttttttttttttttttgtgagatggagtctcgctctgtcgcccaggctggagtgcagtggcgcaatctcggctcactgcaagctccacctcctgggttcatgccattctcctgcctcagcctaccgagtagctgggactacaggtacccgccaccaccacgcccagctaattgtttgtatttttagtagagacggggtttcaccgtgttagccaggatggtctcgatctcctgacctcgtgatctacccgtcttggcctcccaaagtgctgggattacaggcatgagccacgctgggattacaggcatgagccaccgcacccagccatgccacatgttcttaatccagtctatcactgatggacatttgggttggttccaagtctttgctattgtgaacagtgctgcaataaacatacgtgtgcatgtgtctttatagtagaatgatttacaatcctttgggtatatacccaataacgggatcactgggtcaaatggtatttctagttctagatccttgaggaatcgccacactgtcttccacaatgggtgaactagtttacactcccaccaacagtgtaaaaatgtttctatttctccacatcctctccagcacctgttgtttcctgacttttaatgattgccattctaactggtgtgagatggtacctcattgtggttttgatttgcatttctctgatggccagtgatgatgagcatttttcttaaacgtttaaaacatatttttaagcagaatgggccaactcagtcacagtaactgttgatctccatagcagagcaacccacaaagacggaactgattttttacccatattcaggagtgaaaaatatacaacttgtttctgaaccaaaaccacaatttctgcagtttaaaatgtttcactgctaatatggccctggtagaaagtatgtagtttttttttcttctttaaaaaaaaaaaattaaaataatttcctaagacgctaaatcctcaatctggaatgcagattctgagcacaaagcagctcagttaacctaaaaaataaagaaaaaattcccatcacctgtctcagtagggcctgaaaggagagaagtggtgtggggaaccccggctttagtatggagagtcacggccccttgacccaaaccgagactgtgagtagccatagctggtgcttctctcaggataaactcagatgtaggaagtttcactatcatgagagtggaatttagtgtcatccaatttatgcagggcatattccatgtcttcttttctgagatactcaaccatccccacaccgtccttctgcacatcggcataacagacatccccaacttctcgcatgtgatccttcaggtcctgccagctgcctgaggaagtcctgaaacaagaactcggaaatcagatcttcttgcagaaggcccattcctcccaccacggggccacccaccccgacttcgtaagtcctggagaactccacacgaagccgacactggccataatcataactatttcttccataaatagcatcctctgcatctcgggggtcctcaaagcgcaccaaggcgaagggcacaaggcagtgcccattcttaagcttgatcttgcggatccggccgtacttgtagaaaaggtcttccacgtccttctcgcgcacgttggaaggctcaccacgcagatgcgctcatccgcccagcccaacatcggcacctcccaacgccccctccccgcaatccccccgcagcgtccccgcgggctctgaggcgctcagccgcactgcactgtgggaacgagaagcaattgtggtacttttgatacaggagtgtaggaaatgaatgtagccagaaacagagagccaggaaacaagaggaagggtttggggtgggaaagtatggacctggctcagggaaaaggactagttggatggataagaaggaccagcggaaaagaggtagatgccaaaacaagagcagggtgcccttgccctgcctccagtatgtttccaagtcctgacctctcagaccaaactgattccagggactggaagggtcccagagactccatagatggcctcacaacaaaagccagacctgtcactgaacattgaacagccattcaaggaagtcattaaactctagtgggatgaataaagatttgagtaagtgatcccttgcacttggctgagaggaataagggtaatgctgagccaatacacaggtttctttttttttttagatctcatacttcatttcaaaaatttgaaatttcaaagggaacattttgtcaaacttaagtgacagcaaaattcatctggaaaaaaaaaatcagtaggtaagaactccaaagaatatttttgggaaaagaaggaaacaatcatagacaactcaccctattggacttcaaaacataaacaccacgagacgatgataaaagctgtttggtaccaggttaaaaacagaaggtcaaaggtcatggggggaatttcataaaaggtctaacttgataaattacgaaccaataagaatctccccccgcccccacccccccgcccccgccccacttaaataaatgctattgggacaactgctttgcagcactttttttttttttagatggaattttgctctcattgcccaggctggagtgcaatggcacgatctcgggtcactgaaacctctgcctcctgggttcaagtgattctcctgcctcagcctcccaagtagctgggattacaggcatgcaccaccacgctcgggtaatttttgtatttttagtagagacagggtttcaccatgttggtcaggctggtctcaaactcctgacctcaagtgatcttcccgcctcatcctcccaaagcgctgagattacaggtgtgagccaccacacctggccagcagcaaataatttaacttgtatacatatttcaccccaaaataaatcccgcatttgcttaacagttaattatttttaaatacaaaagaaggaagggaagattttattaaggtcataaaattattagcagcaacaatatggctaggtttaattggtacgtttttgttttttgagacagagtttcgttcttgttgcccaggctggagtgcaatggtgccatctcagctcactgcaacctccacctcctgggttcaagcaattctcctgcctcagcctccagaatagctgggattacaggcatgcgccaccatgcccagctaatttttgtatttttagtagagatgaggtttctccatgttggtcaggctggtctcaaactcccgacctcagttgatccgcccacctcagcctcccaaagtgctgggattacaggtgtgagccactgcgcccaggcctttttttcgtttttctgtttgagacgaagtctcgctctgttgcccaggctggagtgcagtggcgcaatctcggctcactgcagcctcaacctcctgggttcaagtgattctcatgcctcagcctcctaaatagctgagattacaggtgtgcaccaccatgcctggcaaattttttgtatttttagtagagttggggtttcgccatgttgaccaggctggtctcaaactcctggactcaagtgatttgcctccttcggcctcccaaagtgctgggattacaagtgtgagccactgtgccaggcctaggtttaatttttaa

SEQ ID NO: 124 - DNA, 74982 bp, Homo sapiens
  source 1..74982: mol_type = genomic DNA
ctggctctaccctgatttctttgttcatttttcttcctgctaaaggaaaatactcacttatttaacatatttaaagctgtgctgagagcaaagcattatcctaagccctgatggtggtcatagcgttgggaatgtacaaagataaacaggacattaaagcccttgagtaccaaacataatgaaaagtctgatatgtgagctccaaaccaaatggcaaaaggaaggaaataattaattcagacttggaaacaggagtgaggggtggggggtgggtgacgggtggaaggggtggcagtgggttggggggctgtcactcagggaagacttcattgttgctggtttgttcattcacgttttcaggattcattcactgatgtctcctatctacaatgtctgctcctgaaagagcccacggtccagcacaggtctggaagacataaaccatcacaatatagtgtgagaaacaagcacgagaggtacacagggccgtggacgcttataagagagaattcagaagatgctgttggtggcttttgaactgattcctagaaataaataggaatttaccaaaggagaagagtggaaaggacatgtaaaaaggcattgagagtgtgtttggagggggaagaggcactaagatataccacccattaggtagaaaggcttgaataccagactaacaagtttggcctttatcttcgaaataatgggcaaccatagaagaaatcggagcatgtgagggtcaagataaaattttagttttggaattttccctctggtattgcgtgtaaggtgtactagatcgggatgatacgggggcatagccacagacgcctcagctgcatctctgcacctgggagactgcaccagatgcgagcctagcagaatgggagagtgggaggtgcgggtgagcgaatggaaggttaagggagagtccctcgtgaggtctacattctgggcaagggcaaacgcagttctaggcaccgcacagctgctggcaagacccgcctccccttccagatccctctggggcggagctcgggccagagcacgtgatgcttggagcaccacctttactgtgggcacccttctcattcatccgcggtttcacgggccgccacttcgatctccaacaccttgaccgtatgccttcgtgagcgaggaatccgttctccttgacacgtccctattgctcctcctgcaaagcccagttagggaagagaaatatcaaaggagtcccttgcccacacaaaagatggcgacctgctgcgctcactctgggtgggggaagcgggttccaggcgccgggcctcactaggcgaggcgcagacggaagaggcgtctctggaggtaacttttcgaccttcctgggagtagctctgaagcgagggggcgtggcctcgcctgagttctaacagatgattggtcttccggcaggtaggtggggaatgagtgctacccccacccctccctcttcgaaccggaagtgtctctgggtctttccagctggttgtcatttcactcggctcggtcctgaggagaaggactcagccgcggctgcgggacccgggcaccgggaggcggtggcggcggcggcggcggcagcagcggcgacagcagaggaggaagaggaggaagaaggaaagaaaaagaagaaccaggaggagtcctcaacaacgacagcggggactgcgggaccagggtaaagcggcgacggcggcgacggcccagcaaccgtgaggagaaacaaaagccttctaaattatagtttaaaaaaaaattctgggggaaaagagagagaaagccgaggggggaggcccttctcctttaaaataactacggtagtgggtttttcctttttttcctcttttttccctctctgcggagaatcgaactgagggaactgaacaaaccgcccctgggtcccatgagggaaaaaaaccccggagccgcagagaggggaagaggcagaaaccgcaggaccttccaggtcgccccctcggtccccgcacccccaggccgcccgctcaccctcgtcgagtctcgctaatccctcctgatcgcgacccccgcaagagggagaaacgggtgtttccaacccctttcatgggggagaggaagccgcggggagcccaggaacagcgaccgcagcaagatctgcacccggagcctcaggaacagccccagaggccaaaactgcaccctgcgaaagagcagaaaacaggaccaggaacagcagaaacctccctgcaatcatctttccattagtcaatgctgatttcctctcccgaaaccaggaattcacttcccaccccagataacctaatataatctatatatataaatatataatatataatgttcttaaattattcctgatttttttttaaccaagctgccaagaaaagaacgtattcccctcttagtcctattctaatttttatgtgagtgaatctaaactgctgaggaaaaccatatgtgattgttaaattatatatatctatatttttactccgcgcaaggcttattcttctacatccatagatgcttgagaagctctgtttttgtcattcatgtacattttcctttggaaaaagaaagcgcctattttactaaccaaagacttgatttttaccctcttcatttttattccctcctaaaaataagcccaattggatccaagtcaatgttttaagagatttttttaagagttgttttttctttcagagaccagaattccaaatcagaacaatttaaggtgataagctgcgatctttgagctagctataaataagacatttcaagcaagcaagcaaacaacttaaatttggggtagaggaaaaaaaaggcgtgagacatcaggttgtcattttttattgtgagattctgctcctaaagataataaatgggggattacgggtttggagtgctagtgcaaagcaatactgggaataaatctgcttttccagtcagattccatccacatctgcagcctccacaccatcaccaaaatgccacccccagccctgctgcttttataaataataacacagctgccaatggcagcagtgctgggtcagcttggctttttcctgctccagctacccataacattcaggatgagatcttggggtcagaaaaagcaaaaagtcagcaacaggaacagcaagaccccttagaaaagcagcagctttccccaagtccaggtcaggaagctggaatactgcctgaaacagagaaggcaaaatcagaagaaaatcaaggggacaattcttcggaaaatggcaatgggaaggagaaaataaggatcgaatctccagtgttgacagggtttgattatcaagaagccactgggctaggtacttcaacccaacccttgacatctagcgcatcgtctcttactggtttcagtaactggtcagcagcgatagcgccttcctcctctacaataatcaatgaagatgcaagtttctttcaccagggaggggtccctgctgcttcggctaataacggtgctctgttgtttcaaaatttcccccatcatgtcagccctggctttggaggcagcttctctcctcagatcgggcctctctcacagcaccacccacatcaccctcatttccagcatcatcacagccagcatcagcagcaaaggaggtctcctgccagtccccatcccccacccttcacacatagaaatgctgcttttaaccagctgcctcatttggcgaataatcttaacaaacccccctctccgtggagcagctaccagagtccgtcaccaacaccctcctcttcctggagcccgggcggtggtggatatggtggctggggaggttcccaaggccgagatcaccgcagagggctgaatggtggaataacgcccctgaactccatctcgcctttgaagaaaaattttgcaagcaatcatattcagctccagaagtatgctcgccccagctctgcctttgcacctaaatcctggatggaagatagcttgaacagggctgacaacatttttccttttccggtaagattatgttccattaatagattaggatgaataaggaaatagcatggtgtaatatctatgtaactagagtttgaagtgcccgtattcacatcagagcttttcttagagagaaaatgaatcaataaccagactttattttagcaggagtgtaattggaacaaaatattcagctgtttctttggcagttttctaaattgtagccttaatcttgtcatagataattatgaatacctggtagctggtgatgtagtaattattaactataatacctttcttgcctgacatgagaatcagggtcagttttttccctatttagatgagaataaataatatatagatataaatatatttcattgcagaaactattgaatgttttctgaagtaactatataactaaacaaatttcttttgacactataaggtagtgattcactgaaaaccagctattgaattacagttttctcactggttggttgcattttaaacctggaaactctctgaaccttgtaggtctgaacagcctgaattgatggacttggcaattcctcttaaacctctgcaaattttggcctacctttcatcagtaaggactatctagtgagagaaatgatctaaatgttttcttcatccccatttatttttgaacactgtgaaactgttcatctcagagtgactctttatgcctttcacccgtttgtttattttccaatgttaacattgaagatgtagataattaaaccattcctaaaaatagatccaggcaaagatcatttgtctttcttgctaccagaatatctttattctggcaagagtcattgatgtttttgaattaatgagcagcaagttaggttgatatgaactagataaagggaatttcataggtggttgaacgtcagatgctccactaaatgtatatactttgagggtatgattatatgtgtttaggaaatttataaggggtaagaatctagcattgaatctagttttcccaacaacctcacaagatgagttctgttattatccccattttacagatgcagaaattgaatatgagaaatatataataacttagccaagggtacacagctggtcagagtacaaattctaagttaaaaaaaaaaacaaacccaaggattgaaaatatgtatacatacatgtgtgcacgtacacatgtgctacagctagagggttactttagaaatatttctgcaaaggctgaaacagattatagaatcattgcactgttcccaaatacgatgttagccctagcagaattatctgttttaattagtaattgactgagagggaggggaagtttgctaagagaaccctatgtcattcctttcctaaggattcaggtgcagtgcatcttaaaatatgtgggtatatttagttttcgacttctaaaaacgatttttttttttttttgcctatcaaaaagctgttggcatttgctttaaagggtttcagttgttaaaaccaaagatcaattactgtgctttagtggtcaagtaaaaaggctgtttaagacattgacaatcccatgaagtctatttttaaaaagttgcctttgatattcctttgaacataaatttaaagaaaatttaatgcaaagataagttttatgaattattcttatattgctaatttaaaaattgtaagttaacattcagtacattttaactggattaagatttggctcagaactaaatacacctttttttcttattttgctactatatgctgacacagtgaatttatgtggcctcacagtttggttcccattctcagcttactgacttttgttaagattgctttaggaaaaatgaaaagttcagacaatgaataaaatatacatatatgcacattaatattttttcctattgggctaatagagtgtgtgttatgtgtgaaatctttttgaacagtttctttggagattaagttgatttatgaaataatagttagactaagattgatactaaaatatattgttagaaactaactcttcccttagaactgctgtcttttatattgattatgggaaaaggatggtcagtgtacctgactttcaaatatggtaagattcaaaagtaaattgttaattctgctcctcatccccaccatttgtagctctgtgtgtgtgtgtgtgtgtgtgtgtgtgtgtgtgtgtgtgagagagagagagagagagcacacgcacacatgtatgaggagagagctagcagtggggtgatttgaaagtcacaagagaaataaatgatttgaaaaaaatctctatgacaagaaactcctaattgggttttgaaaaagtctaaagaagtaagtaaactgaccactgtgattcttacttaaatggatacagttctttttgctttttaaaaaccaataattcttgtgaattagttatttttgagaaaaagtatcattttaagttggtataagtaacttggttaaatttgtcttatttaaatttataacttgcaggcacgtgcctgtaatcccagctacttgggaggctgaggcagaaggattgcatgagcccaggagtttgggaccaacttgggcaacatagtgagacccccgtctcaaaaaaaaataatttataacttaaacactattaattttaggaaagaaattttatagatattagcacttcaatttaattactattaaaataattcctttcttctgcaatatttctcacaggggaaaaaaaaagaataaaaagaattccttaggcgtgatagagagatcttgaaacttaccacagacattaaggatagtgcttacatgggtacattataataatggtattcaatcaaaggccagcacgttattgttatattgaaaggaaataatttacctgaagtgtaactgatattaggcaatgtttattttaatttgaaatgaaccagaatgatttttacgtttgtttactcaggtttgggtacatataatgaattaaaattaataaccttttaaattcataatcctcccccccaataactgataggggaagacattttatttggaggatttttgtatattaaaaggtgtttctaagttatttttgcttagcttaaagcttcattacatgaattcagagggcatcactcaaatcctgattttgtttgtttgtttcttttaagacagggtctcgctttgtcactcaggctggagtgcagtggcataatcacagctcactgcagccttgacctccctgggctcaagagatcctcctgcctcagcttccccagtagctgggactacaggcacatactactatgcccggctaatttttgtatttttttgtagagacagggtttcaccatgttgtccaggctggtttcaaactcctgggctcaaataatccactcgcagtgctgagattgcaggtgtgagccaccgtgcctgactgaaatcctgtttttagacacagctaaagtaatatgcatataataatagctaacatgtggcggggtgcggtagctgacgcctgtaatcccagcactttgggaggctgaagtgggcggatcacttgaggtcaagagttcaagaccagcttggccaacatggtgaaaccctgtctctactaaaaatacaaaaattagctgggcgtggtggtgggtgcctgtaatcccagctactccagaggctgaggcaggagaatcgcttgatcccaggaggtggaggttgcagtgagctgagatcatgccactgcaccctagcctgggggacagagtgagactccgactcaaaaaaaaaaaaaaaaaaatctaacatgcctcctgtgttctaaatgttttacatgtattgattcatttaattcactcaacaatcctatgaagcagaaattattattatttttattcacagacaagatttggctcttaatcattatactacagtgcctcttcacataatgataatatggcagggggatagtgggtgcaggtggggctggaagggagagtgcctcccagacgcatgtaagatgagaggaaaaaattttacagtgatacatgatgatcaaaggctgattgtagatagagtattgaaaggggaaaataattgagtatacttgtttatcaactttaaatgttaaacttagataatattttggtcaatgcttttgttttaaattttgagcacatgttatataccaggcactgggctaggtgctttcaaatatgttatttcacttcctatgtgggatttctcagccctgtgacatttggttttattgtcccaatttcaaaatgaaggtccatattcatgtgactacaggcatgattggacccttacagtaaggaaaaaaaaaatcctgtcttaccaaacatatcttagaattctgacatccaaagcagataatatattggggcacctgccaataattatatttgagtatagcatttctttggaggggtgcctggatcttctatccttacaggaaagtaaaggagaattacttagtatatgtgctgacaccctcttaactacagctcaattatgttgccgctttcattagctaagagtcaggtaggaaggaaaaagacaaaatcagtatgtcacaaagactatcctaaaacttgtttgatagggaaacaagtgtctagatcctcaaaattatatactgcatcttatatttgcaaacagaacactgctggagtgcttcagttctaaaagtcatggtggattattaaaattgtctaataggcaacctcattacattttcttgtttcttaatacagtatcgttccaagaaggatctttgcataggaaacattttctttgacttagaaggggagaaatcagttttttcaactgtaaattgtgggtcggatggttctagatctagcagaactgacatattggaaaaatcttcctctttgtagaaggctttttaactaggttagatagcttttctgatgaaattaaaactaattccagggtagagtttttttctttttctttttctatcttcagagaagccatcttcagagaagccatggaatatgatcagcacattgttccaacacctttcaggaaaaacctgtttatcgcaagcctaataaatgtggttgttgctggttgcaactagaaagatgctacttagctcatgagtttaagtttttgaaagtcatcgttgttggtgttcataagaaagaaatggggaacctagtttttaaattaacatatgcctaggtttgaatttgacagtttcagtttattttccttatgactttctctattttgctaggaggaaaataagcttgataattcgctgtcatattttttcagcgctgtattgtacctcagtttttggtctcatctcacataagataatgtgaataatgtgcttctctttaaggcagagagcctataatgtgagcattttaactttttgtgacaaaattcattttattttatgtttaattgttcaaagttgccttgcagaaattaaaagtatgttttaccatgataaatttagagcaatatattttttaaaattcaaatttattggagattcccatccattttttctcaccgcattttatcttattgaaacagaatgagttccacctttaagttttcaaaaaatacttagtagatagaaagataaagttgttgatactattttcaatcagtttctgaaggtgaaaagtgaacaattattgagaaaggctattttgtgagcccaaaaatgtagagtgaagcataggctgtggactcagacttaagtttgactctgaatttgaatgtaattatttactatatgaagctgttgtaaaaataaataaaatgcatatataaagctttaaaaattttgtctctaaactctaatgagcagtgtgaccttgagtaaatcttttaaattccagaagaaaataccgtatcaagaaaataataactggccgggcatggtgggtcacacctgtgatcctagtactttgggaggccgaggtggacggatcacttgagcccaggaatttgagaccaggcctgggcaacatggtcagaccccatctctagaaaaaatacaaaacactttttctaaaatatgataatacctaacagtgaagggtaatgtgaggcaccttatgtatgtggccatattaggttgattaactttttaaatttaaaatatggctttcttatattgaataaagttatgaaattagttacaaatatagcttgtgttactgtgaaatattttagtcatgcttatcttgctatatatgctttattgaataagctatagatgcaaccccagacagataaaatatttagcagaattatcaattttctcgaagagaagttttctaattaaatataagcttaaactttcattagcattgacagcctgtttctttcaggattttgaaagattttggccacagttgttttattaagaactttagaacatgtgattgcttttgcatacattaaaggagactacattttaatggagaatttatgatttttcagtaagagatatgaaagggtgccatagatttgaattgagaatagtttggcttttatcctggaatcaagagtttttaaaaaatattttaatgtatttagcacacatttattggagcacctactatgttatggactaagcacaggactgtcataaaaaatgaatcagtaacatggtttgtaatgtatttttgacctgtgctaatctttgagtaagactgaacatgcatttttttctcttaaatattataaacaaattatcaactagcccaatagtttcattttaatctataaattgtttaatcattaaggcaaactaacattcaattttagctataacaaaaaattgtataaatggcatttccaaacttttttattaacgtagtcattaatgtgtttataaatatatgcttatatttggaaattttaaatttttagaaaattataatgtttttggaaaaatatttggaaagtgtaattatcaattataaatacacactcgtataagttaccgtatgtttatatataacatgtgctgatttacattctatgacaaaatggtaccacaaaaggcaaactttaacttggatagcagaattctggtcctgttacatgccaaagaaaaactccatcagctacctataggtgctcattcatgtttacaaatggaattattcaagttcaaagctttaagctgtacaagcgcattttatattgtaggttattttggttgggcaatttctatttgctaaagatttatcagatatattctaatcattttttagtagaccaaaactaagttataattagttcctcagtattatatattttaaatctatatttattttaaaataccatgtaacaatttaaataatagttcttccaggtattcttgaggaatgcatctagtcaataggatcatggtactagtcagtaaaatagttgctgccattttattgtctatgagaccttaaaaaaataaaaatataagaacgtgactcagaatattcacatactctgaaaaaatgttattagaaaactatctcagttaatggaagtcagatctgggttccagatatggctcggccattcattagctatgtgacctaggcaagctacagcaccttctgggtcctttattttctcatttcttttgtctggtatttttgaggataaaatgaaatatgtctaatatttggcttctagaagattctattgttttaagaaagcaactcatcaaacagaaatattaagtcaaagttttattcaaaatatagcacaatttcttaaaatctgaaaacccgtgtgtaactggtgtgtgataatttgaacttaattttattttttgagacaaggtctcattctgttgcccagactagagtgcagtagcgcgatcttggttcacagcaaccaccacctcctgggtttaagcaattctcgtgcctcagcctctccagtagctgggactacaggcatgtgccaccaggcccatctaatttttgtaccttttagttcaccatgttggccaggctggtctcgaactcttgacctcaggtgatccgctcgctttggcctccggaagtgctgggattataggcgtgagccaccgcacctggcctgaacttaattttaaataaataaaatacaattcctaaagtcactatacttaaataatggtgggactgaggctagatgacacactgattttcttgaacactgctgaaagtgaccaactggtgatattttttttctctcttggtaaagcaccccctgacccatgtcttcttaaatttttattatggaaaaatttaaatatattccatggtagacagaatagtctagtgaactcccatgtatgtgtcacctggcttcaacaattatcagctcctggacaatcttgtttcatctatacccttaatcctctctctccccatttgtattattttgaagcaattgcttcatatcatattatttcatctgtaaatggttcagtatgtgtctctagaggagtctttaagagaaaacattaaaatttttttcaagttgtttttttaaagaagggtagtgagaaactgaagcaaggcccacatttctgttgtacctgctcagtctgtttcactgctcaacctggtgccaatagtggtggaccactgttggcttcatcttctctttctgtaacatagaaaaataagagatccagttaaagcacccaaataccagctagtgattcgaaatttgggaggagagtataccgttttcctcccttcatcttatcctttctctaggttcacacttctgtggacttgtgggcaagacctctgaaaggaaagatgagtgagagaacaggacaggactgagcttttatggttgctgtcttttttgtttttctgttttttaagaggaatgtagaggtttggggtcccttgcagacttttagactgcatcaactttttacatttcttgcttgctttcagtgcacaaatgtttgatgcttttgaagggccatgggctgaggatgcttagctatggcaaacgtgatacttctgctcctgaagtgcactggccagtgacctcctctttgtgcttgagtgttgaggagtgccttctgcccaggagattctggagaactgtggatgggggtcggggggtgttgtgagagtctggaaatgtggaggctgggcacaagctgccttttgagatcactgtcaaggctcacagaagagatgtcgagggttacaagacataagcttcagtttaggaataaaggttgtgcattggccaggtgtggtggctcacgcctgtaatcccagcactgcgagaggctgaggtgggcggatcacctgaggtcgggagttcgagaccagcctgaccaatatggagaaaccccatctctactaaaaatacaaaattagcctggtgtggtggcgggcgcctgtagtcccagctattctggaggctgaggcagaataatcacttgaacccaggaggcagaggttgcagtgagccgagatcgcgccattgcactccagcctggacaacaacagcggaactctgtctcaaaaaaaaaaaaagttgtacattagggtggacccctctccctgctgacgccggaccctgctcagacctagcagacatggagaacaggaactctaacagccagttgaggtctaaataacttcattcctcaaggctgagtgttagtattgtttacctgctttccttgaactaatgacttcttgccctgaatagtttattagggagaagtcttatactgatagttttggggtcataggtttgaacatattttgattatctctatgaaaacaggttatagaaaatagcacagaatcactgacttattcagatacaaccgatatctaatttaaaatgtgagtttcatgctttttttcattgcaccatagaaggggcagagaaatgtttattgaatgagttcactaaccgccatgctttgtgctcctgctgcccatataccttatctcactggcttttcactacagatttataagggaggtgctattatcctcgttttgctgatgaaattaaggttcaatgatattgcagcatcaagatcacttgcttagtatgtttgatacttagtatcacaagtatcaaagcttgtgatagattttaattatttctctctgctaggcaagattagtatgaacaaattgtcaagaagaagaaaaggtctattgattcaggaactgactgactaatcaagcctagaatggtcatttggttttttaatacaaataagtgatgacaagaaatgtttatcattttaaggatttataatgctcaaaatgaatgtgatttatttagtaaaggtgcaataaaaaatgttctcagaggctttctggagagatcttatttgtcaattaacatggcaaccaaatggagctgttgatccaaggtaatacactgaagacattcattcatttagttgtagatcataattctattagggaacatgtggtaacctaagatctgttagactctaccttcattacaggagctataatgaaaaagtactgattgaagagggaacttgcaaagaaatatgagatgctgttaaatgtggtccctcctgcttcagataattaccactttaactttaatctctgatgctcgttgtcttcattcaggccacgtatatatagtgaaggatttcatacctggcaggtaataatagagcaaaaattctaggcccaaacaaaacttcacttaaaccacttttcctgaacatctgctctgaagtcagactcgaccacttactgtgtgactttgtagggcaattagttaacttctcctagcttcatttgcctacgatggggaaaataaatgacagtactgacttcatatgatggttgtgaggaactaatatatgtaaatgttatgtaattcatgtaagatgcacaacacagagccaggaggaacatgttagccactttctatatcagtggcgatggctttacggcatgctacaagctgtggatatgaaaatgagtgaagctcatggcgcatggtgatagtataagctctgtcatacagagcttatcactatcttgtgggatgtcagagtgctagggagacataagggaaaagggatttgctgcctgtgtagggatgtgagggtcatttggaagtggaatcttgaaagttgactggatagtccactcttgatgatctgtgaatttacatattatttaattcaagaggaatatttacattttggcaaatcttgaattaaaactcccatagttacctttgattaattatgggctctactggcatctcaaaatttctatttattttggcagctgacacactggcgtacactttcctttcaaaccaaaatattttcccttcccttctttaccagggaaagtttaagccagaaagagaaacttctgtagcctggtacagatatgtagcagtctgagaaatgatgatcacagtaatatatgtttttatagaaatagaatgagtcaagggatagctgaattttggctttggttcttaataatgtggttacattcaattaattaccttttgtgttttagactcagtctagtaatgccaaaacatactagctcaagtataaaaagaagcaataatagagtggtggtggtggtggtgggtagcatgggttatatttagatgagaacatttaaactcagtacagtttttgcctgtgagcacataacctaactgtgaacaccccagcatccaagacaaaaatgtaacatgatgggtgatgtagatctcattctctaatgaaaataagcatacttttaaacaagagtgaaatatttttgagagaaatttgccttgcaggtttctaatcatggggcgttgacagacaatgaatttttccattgctgacaaattttacaagaaaattcatagatgtttaacaaacagcagttactaatattttctgcttattaaaatctgagatcatgctgttaagccataattctataaaagcaagtccaaagggaccagtatatactatgtattttctgatgatgtgacttgataaataggttgaatctgaaggaatgagtaattagcatatcctttgtttagactgtttatcttggcttgtagggcatttgaccagttgtgagagagagaagacatgtcagtagtaaatacctgaatggcagatattccatgtagctgaatgaaaaaaaaaaaaaaaagctatatgcttaagatatggggtatatggatgccagagatagtattttattgtgaaaattcaagcaccaaatttgtattttgtttgttcttaatggtgagccactcacctcttgatgctttttcttaaggaattttgttttggtgaaattgaactttattttaatctttccaaaggtatggaccttagaacttgaaagacagagctgtttcaggttttgagagcaaagcccttctcttcataaggaaatcatacagtagttcctgtagaatatttaagctggactgcatcatagctggccaactaggataaaagctataaagcacacccctaaggatctaatgaagttaacctgttgaatggatttgcttaactccgtggttctcaaagagtaatccctggtgtcatttggaaacttgtcagagatgggaattcttggacacgacccatgctgaatgagactgtggggatggacccagtaatctgtattttaacaagaactccaggtgattctgacgtactctcaagtatgagaaacgctggcttagatcagccatctggatgttaaaaaaaaatggccacaaatgattattttggtctgtggcataattacaatttggttgtttttcctgataggaacagaccagcaggttcacgtgctgcttgtggcagcttctggaatgtcatgaaaagccttgtcattagctatatactgatgtaggtcttcccattttgccctggcaggcagtattattcaggtgtatactaaaaacaagggtcctctctgaaacattcattttgttttgtcagaagcttatttttatcaactttgattttcatagtggtatcataaggtctttcttttagaaattgtcctgtgaagtagagatgacagaaactgaaactaaccagttactgacatgcaactcagtatattaaatataataattaagactacagaatatgatgaggtttaagcattgtgataaagtttgctttgcttagccttgaaaatcattggtgatcttttattttccttcatgattactaagctcacatgttctagagtcagaaggtctgggttcacattctgcctccacttacctaacattgatggaattatttaaatactcgaagcttcagtttcttcatctgtgaagtgggataataactgaacatatctaattgtatcagggttttgtgaagaataaatgaggttatgaatgtaacccataatgttagctgctgatagtaatcctattagtactgttactaccaccagtactcctgtggttagtagataacccagagatgcatttatgatgggtctctaatttgtatgccactctgtcatctcaatggggaaaaggaagataagatttctctttctcttcttatggttttagtacctctgatatatatcatttgtataggtaaaatataaaaggtaatatttgtataagtaaaatataagtaatatttgagtgcctactgtttgccaggcactagccagcatattcataccctcagaacccttagagtgcctcctttattcaaatgtatgtcttaattagtatggttctttgccatgatcattaccctacccaaggaaggatcacttacttggtttatagtaagacttgggtttgaatctgactatgccactaaactatgcagtaaccaatctgtgtagtaaattgtgtaagttttctttagtctcagtttttattattaaaataggagtaataggctgggtacagtagctcatgtctatagtcccagctacttgggaggccgaggccagaggatcactggagcccaggagtttgatgctgtggtgagctgtgattgtgccactgcactccaacttgggcaacagagtgagaccctgtctcagataataataataataataataataataataataataataataataaaaaaatgtaacttagaagatttgaggattaattaagacagtgtttatcaagtacctagaataatatcaggtgcttagtagatgctcaataaagggtaggtctgcttttctaatttctccctttagggtgccaagagaaactggcagtggggttgaaagcaaattgagttgtcagtatcttttgttttataagagattctttaataatctatctgaaagcagcacacttcactcttctgtcccccagcaaattttttaagtagattttttttgaaagaagcttattttatgttttatgtagcataattaaaatgccatgattgtctttttttttttgagatggagtctcgctctaacgccaggctggagtgcaatggtgtgatctcagctcactgcaaccccgcctcccaggttcaaacgattctcctgcctcagcctcccaagtagctggggttacaggcacctgccaccacgcccagctaatttttgtattttttcaccatgttgtgggcaggctggtctcgaactcctgaccttgtgatctgcccacctcggcctcccaaagtgctgggattacaggtgtgagccactgtacccagctgtgattgtccttttaagactctaagtgatcattttcttactaattgatcactgacccttgcctttttgtgggcaaaagtgatggactttgattagtgggcaaaagtggtggactttgattaataaattctcatccttatttttggttcctgccataattgtcataatttaaactgtaaatcttgaaagaacaagacatgttaggatatcaaaaagctagaatacaaatgtattttggagttaggacagggacatcagagatccaatcaaaccactccttttatggaccagaaaagaggtataaaggacgaaagtgcccaagctcataaaatacgacaggcagagttgaagcttcctagtgtctaatgcccattccactcatttatgctaatgttcatgttttggtcattagctcaagttcaatcaagaagagcatcacctaacaaggtttctattttacagttaatctttgggaaatggattctagaaaataggtcagtggttatatttgatccaattaacaatttaaaaaggcaaaattgaagaatgaaatatggaaatcaaagcactcttattcttttgatttgactctttcgttgttgcataggaaaaccagcattgtttgtactgttcttatactttgggtttgtttatctgtgtcccctttatctatttcctaatggtacagacacattttaggatttttttaaattagttgttaaaaatggacagaaaagatcagtgagggagtaaatcaagaatggcaatcttaaaacctgctctgagaacagaatgtttacttgacaaaatatgtggcttttgaactctttgaattaccaaagcatcataaacaaaatgtttgtagtaaactatacttgctaataagtttgggttgtggggaagaatacatattagactaggtttggcaagaatgaagtacttgtgtcatcggaccttataccttgcagcagtctgtggaggcagtttccttctgagtccctgtagagcctgagaatccttctcaaaacaccttgcatctaatagtaccaattgaacaaactttgtgtatttgtatttacttgtcatccctgtattaaactgtaacaaattataggaaaaaattagtatcattactaaaaattagtgtaaaaagggtggagaatttcttttcatttcataaaacattactgaaaatttaaaatttaatttaggattttagttttaatgtactttaccagttagaagtcagcaaaaatctttatgtttcccacaatatgcttggggtgcccatggggcagggtagtgggaggaaagtgtggaatagtttactaaattccattcataataccacatttaaaaacctataggttgccaggcatggtggcttacacctgtaatcccagcactttgggaggccaaggtgggcggatcacaaggtcaagagatcaagaccatcctggccaacatagtgaaaccccgtctatactaaaaatacaaaaattagtggggcgtgatggcacgcacctttagtcccagctactcaggaggctgaggcaggagagtcgcttgaacccgggaggcggaggttgcagtgagcctagatcacgctactgcactccagcctggcaacagagcgagactccgtctcaaaacaacaacaacaacaacaacaacaacaaaacctgtaggtagaaaaacaaaaacaaaaacttacaggtaaaaaggaggcttcttgacttactggaaatagttcttataaaacaaaccaaacaaaaccagtctatattttttatcaattgcttcttttcagtgctcttgtcattcagtgattgcaaaatgcatgttccggaaattcataaggttgcttactctgttagttgcatgaaaaacaacactaaacttaattcctcccctcccccaaaagaaaacatacagctctttagagggaaagggggaaatataaagacaaataaatcttaaggaagtagcagagaatattttaaatgtttaaaaattacatgaaggaatacatccattcattgatttagcaaacatttgcatgctttctacctgccaagacctatgtgaggcagagtaatacagaaatacaggacagtgcttcttaaccagttttacatcatgacacacatagaaaatgataatttttaaacggagatcatctgccaggaagctcctgccacctcaggctcttttggacagtcttgtgggcttaggacatgactgacttggcgcaccatcaccctgttgtggtaggcatactggaaatatttgatgtgagacatagttcctgctcttgggaagctcacagtcagaggacacagccaagtgaacagacaccaggaattattgcctccaagactggtttgtgttggagatggaaatggatggcccttttaaaggtgtggttcattgctgaaatagaacatatccagcaactatagaatgagatagtgtaattttatattaacttctaaacctcaaataatgcctcaagtctacttggcttctgaaagaatatgcaggttttgacttaatttagtgcttgaaatgaggaagtgtaaacacagaacagcttctctcttttgggaatactaaaccttagtctgatcctggccatgtatactcctgcctctctatagatagatcttgttcaggagatgaggataatgaggaaagaatccggtggaagaggtggggcaaagatgttctggagggagtcataccagtttagagcaggatagaatggtaaggcacgtgttcactcttccccatcctcatcctcaccctaaccttcccacccctgggggaaaacttgaaatactgtctcttacctgtaatattagattctacctaaatatactgtccctggactcctcaagttgcagtggtattataaaaccactcagcgcacattactgaatatctgcatgatgagatggggtcaggaggagtggtccctatttcagggaagcagaagaatcatgtggggtaagatgtgttacaaaagcacagaagagaaatgttaggtccatccaaaaaaaataaaaaataaaaatgctctcaagtggaggacatcctctgtcagcttagatgttctagaagttagctaggaaagtagaaaaatgaaggggatacaattaggaggtgatgttttaaaaaataaagtcaaagctttgaatttaaattgtaatgtaaaaggaaatataattgaatagaagttttagaattctgcttgcagattcctttgggatcccctttttctttaatattcttgcagtggcctttgtgtgtttatgtacagtatccttaaggtgggtcagagcatgtattattgctttgtctcagtttaattttaaaatgttttcatctcctactttcaatgtatcaagctaaaccttaattttagttgtctctagtactcttcatcctgaggaatgtcagagcacttgggatgttgtatattttaggattccatacccactcttgaaacgcacttggttaagctaggggtttaggtcagcaatgtaccccacactcttccttccctttaattttaatgcaacaaaatcaagcctaattttgcaagttgagagtaaataagaattgagattttgttttgttttgttttgttttgctttctcatctaaattctaactcttattctaactctgatccttttattctttatttaccagaagtaatgactgggttgtttggggacctaataacacgttgcattgggggcagggagggacagaacatgcttcagcagttctctattgctattctcatccttctccttagagaaagcctcgtgacagtaatgagagcagcttctgtgcttcattattccagatttatttttatgttgggggaagggagagtctacgaaattttttttttttacatgatttttggaaggaaggagattttttttcaactttctatatagattattagttttaaaaacaaatcttcagagaaggcaaatcattaacagtcaagaacaactttgataatatatagagatgaataaatcagtatttttattttcttaaaataagtatataatttatcttggctggatctggtggctcatgcctgtaatcccagcactttgggaggctaggcaggtggatcctttgaggtcgggagttcaagaccagcctggccaacatggtgaaaccccatctctactaaaaatacagaaaattagccgggtttggtggcgggtgcctgtaatcccagctactctggaggctgaggcacaagaattatttgaacccgggaggcagaggttgtagtgagctgagatcgcaccactgtactccagcctggaacagtgtgagactgtgtctcaaaaaaaaaaaaagatttctctcatttttttttttgtatgctttaccatttaatagtcttacaatcattcgatgactatttttaaactttgccttataagaaaatatagctattttgaacagcacatacaggtaccagtctagcagataactagtgggacaagtttggaaagctttgccacgtttttgcaatcttaagtgatgggaaagaattttttttttttacacttatgtaatgttcttaactaatacagaaattcgttttaatggttttggctttctgaataaatgtgatgcttttgttgaaattattgttagaagtcaaatcactctttgctgagccctgtgtacttacttttgtggtttttgatgtttggtgttaataataacatttagtaataatgtgccttacatagagagtaaaattgctactttgtgatctgtgtcccatctaatgaaacttactgtcctcttttatatttaaatgctattttaaaaagtggtttgtggctgtttgtgtctacaggatcgccccaggacattcgacatgcactcactggagagttcactcattgacataatgagagctgaaaatgataccattaaaggtaagtttagaaatatacccaattgatttcagacaatagttttaaatgtgtattaactatttaatctgatacacagtatggcaaatattatggagtcactttgtatgcagtaagttctatcaattttacacatatacctcttgttgttaaaaaatccaacatacttgatgaacctctatagtggagccatcgtgataccaggtaagagtactacgtgagtactaattgccaagaatgggcaattatctcaaagacaccaactacataccttattattattttttttatatctcaggcaataacttctcagtgtcttagttgtttatgtctacctacttatgacagtgattatgtcccaggaacagttcacatgttggtagaatttttgcctactttcatgttttaaaaaataaccaatagtttcaaagttaaaatgaagttctgtagttctcagaatttttttctatgtattatgttaaaaaaaaatactgtttctacatggattctagtctcatgttactgacaagttgtgttatcttgaataagacattctgtttgactaggcctcaatttcttcacctttataaagacgtagaattacccgggtgctttaaaaataaaatgtagatgtctggaccccattccatacatggggtgcgggcttgcatgtttttatttttttttgagacggagtcttgccctgtcgccaggctggagtgcagtggcgtgatcactgcaagctccgcctcccaggctcacgccattctcctgcctcagcctcccgagtagctgggactacaggcgcccactaccacgcccggctcattttttgtatttttagtagagacggggtttcaccgtgttagccaggatggtctcgatctcctgacctaatgatctgcccgcctcggcctcccaaagttattttttaatatctcaggtgatgctaacatgtagccaagaatgaaaattgcaagactagatatttcctaagggcctttcctctgattttgggaaaagtatctcacaaaataaaacatttttctggataaaaatatcagtttattagaaagcaggtttttttttttttttttttttttaagaaacttagaatgtttggtatatttggtcatcccacttaagctgttggctccttcattcattcattcattcattcattcattcagtgattcaatgtttatgacactgctttgtgccagacatagagctttgcactgaggtcaaaggtgacaaggcagcctgttgtttcaactggtgacctgcttagcctagtttccctttgagtttggcttatcatgttactgatgcagaaaaacattttatgtatttttcagtagaccaatagtgataatattgttttaatgaagaaagcttttaggtttctggagagagggaagaaaaataatgtgtaaaaaataggcatccatctgatgtgatacctttgaaataagaatatttggaaggtctttactgagtttctcatggaattctggtggatgactttagtgtagatgcatgctatatagctgtggaaagatgatctcccactcagaattggctttatttttgctactttttagcactctgactttgggtagtcttcagcctcttggaccctttgttttctcttcagaaaaatgaagagtctaaggtgctatttctagcaccagaaaaattgtacactcttaaaaaatagctaaaggaaaaatatgaataaggtctgtgggttgtaccaatgtcaatttcctggttttgtattatagttatgtaaaatgttgccatttgagaacactggataaagggtacatgaggctttctctgtactacttttgcaacttgctgtgaatctataattagcactttgggaggtaaaggagggagaatcacttgagcccaggagtttgagaccagcctgggcaacatggcaagaccctgtctctatataataaagtaatttgaaaaagaaaaaaacacagaccctgtctttatataataaaataattttttttttttttttaaaaagttaaggtctggtgcggtggctcacgcttataatcccagcactttgggaggctgaggtagaggatggctggagcccaggagttcaagaccagtctgggcaagatggtgagacctggtctctacaaacatttaaaaaaaaaaaaaattagccaggcatagcaacccacacctatgttcccagttacatgggacgctgaggcaggaagatcacttgggcccagaaggttgaggctgcagtgagctgtgttcctgctctttaagaccctgtctcaaaaaaaaaaaaaaaaaaaagtatggaaaaagtagttaaagaacatttgtatattcttaatgtgtttaattctttcagcacattttaaaagagcttcccatacactaggtactacagataataagtaattagaaatcattttctaagtgcctatggtttttatcacagaaaatataggttacaaacagcagtggatagaaacaacttgttatgtgacattttaagaagcaagcctctaactaatacttaggttagataaaagagttggcacacattattcttttttttttttttttgagacaagagtcttgctctgttgcacaggctggagtgcagtggcacgatctcagctcactgcaacctttgcctcctgggttcaagcaattctcctgtctcagcctcccaagcagctgggactacaggcgcctgccaccacgcctggctaatttttgtatttttagtagagatggggtttcaccttgttggttgggctggtcttgaactcctagcttcaggtgatccacccaccttggcctcccaaagtgctgggattacaggcgtgagccactgcacctggccagcacacagtattctgatacgattaacaatagaatttccttggccatcagttttagccaggacatctctatcagatttttttcttctaatttgctcaacggataattgtttaaagttctgcctttattctatattctctttttaagttctccttaccaatttttactaaattaagtttctttaagctgatattatagggataatcaaaagttaggtctgatgacaaaataaattaagtctgattgatctaatctgggaacatacagattttgtaaaatagtgatttatagactgcaacgtgatggaatagaaagacagtggcttttggaatcagatctggttaaacggccactctgtcactacagtctgtggtggctgtgaggatgacataatatgatgcagctatagatttcagcgtattgcctaattcatagaagacactaaagaaattacatgtattattactaaacatgtaagtctgctttcatgctcatcaaaaaagccagcttcagtttaagtttaggtgccaatctggcttgagtatattacaggaagcttgtgtgttttttcctacaaagagcagtaaagaattcacagatgagtgcatggatctaaaatgccagattatagttacgcttgttttctttttcaaacaagaccatgacctttgtatcattgtagcctatcactgccaagacattgtttttgctcagggtaacattttatttcttgtcaaactatcttctgatttagatagctattttaggaatactatgcttgattttaacagtggttcattctattgtgaaattttgtttaaaggtaataaagataataaaatttgaataacttaaaaaaacacattgtcattttgaaataggtatctaacacctaccaattcattttgaaaataaataaataaaatactcttctagtgctctgcttccttagaaacagaaaatagaaaattgacattagccaggtgtggtagctcacacctgtaaccctagcactttgggagggccaggtgggtgcatcacctgaggtcaggagttcgagaccagcctggccaacatggtgaaaccccatctctactaaaaacagaaaaattatccgggcgtggtagtgtgcacctgtagtcccagttactccagagggtgaggcaggagaattgcttgaacctggcaggcggaggttgcaatgagccgagatcgggccactgcactccagcctgggcaacagaagagagagactccgtcacaaaaaggaaagagaagaaaattcgtgttaattctgagattagtagagaacagtataccactcagaaaaaaaaattaaaagatttgattgttttagactttacaattcaaagacaactttaataatcttaaaaataatttcataaaaaattatgaatgacctcatttatttttctctttcatttctggttcctcataggtatgcagtttgtgtgtgtatgtgtttaatacggcctaaaattgctacgggaactaccagttgaatctattggtgtggctattattaacttaaattttcaaaagagctagaaaacttaatttgtatttttcattttggaacaaaaaaattcccttactgtaatgcggttaaaaaactttatttttactatcaacaaaatgcttaatagtcctaggaacgttcaagtacagtttttgaatttctttatgaatgtgttattgattccaactggtttgttggaaaacttatttttttttaaacaaatgttcaaaggagtacatagctttcataattcgtattaggtttttttataacttatttttaattgcttttctaagaattttgaggctactatgattttttctatgtacagggatttagctctttgtgcggtggggaaagggttctcctcattccttatctccctgtcctttctctggtcagctggcaagtctggatgttatttttatccgcgaaattgtgtattgccttctccataaccaacaccagtgacaatcctcagaagctcttccccagagaccgaattcattttctttgctgcacactcagtctcataagcttagagcctgagctacaggctgattttgaattttgatctcccaggtggcagcttgtgcattgctacaatattattaggcttatcaagtttttcttcacctggacagaaaactattttattgctgtagatgcctagatgattatttggggaatattgtatcttattgttatgcatgttttttctcgcttatgaaattggtacttgttacttagaaatggagcagcatgaaatagattaaaaccacatgcgagtacatctgttttcagccttctgaagcataggttggacacagtgaaataaagattcatgagttagtattatattcagtgtatagagagacctctgaaaattagggagcctttttttcttttctgtatgtgaagggaataaagagacaaaaatagtgcttaaaaattagacgtcagacagaatataacaatccacagtttcatgatagtggttgagtattttaaattcaatatatgaaaacaatataatattcaatttgcttcatttcactagaaagccaaaatgagacagcaaaattattgagagaacaaaggcaatctacagactgtcaaaacattatagttgttcttcagatatgaaattatgacttagatatcatattattcctttgaatagtgtgaaaatggagtctttttctcttcatattgttgtagaatatatgttgctttcagatttttgaaagaaaggctcaacatatccaccacaattcctctgagtttcaggcatttcaagtacttaatttgaatgtaagcaataatgattgcattcagaaatgcaagttgtttaaagtgccagtcttttacatatccccatggtgcccaggaaacctattgcatatgtagaggaagtagtggaagcatgttatacatcactgcctcacgtgtttcatgcatcgctttattttaagagctatggatctactccaaaaatgctatgtatttaattcctgactgccaaaggtgttgtgaccttgcattttaaaacactttcatattttttcttgctttatctacgtgttaaatttagagacccttccctgactatttttcattgctgtaaatttgtttgaaacaaatgcttaaatgagtgggcaagtgatgattccatctgtgcttcttttctttgttgctaagcaaaagaatttataataacctttctagaagaaaatcatgaaactcaagttgaaagtttagtacacaaagcttgtttcatcagttttataaaagttttttttatatcattgtaagagagtggctgtggggattatttaaattctgtatctttacagttgggatagaatttagtgctacttaaaaatatgtaataaataataggaaaccttaacttttctttcgatacaccattttactaatattcctatattccaaattgcagtcacttagttgacttagagaacacatgttgtatactggtagagaggcattagaacaagtattttatacagatactgactctgtgcaggctgaaatagctctggaaacctgctatgagagttgctaaattttgtcacttatttatttcatatgttataaatttgaagtaatttgggaataaataattttttttcaaaatgaaaggaagtcctactaaaataggttctgttgctttaatattagaatgatttatttcaggtaggaatggtggggagagtatataatttcttacagtatttaacctttttctatttaaattggtttgcctgtggcaaaataagaacagattactggtaccctaacctccaacctttttaaaggattagatggacattttcctttaagggacatttaatggggcagattcaaagtaccataaagaagaagtggataggctgggcgtggtggctcacgcctgtaatcccagggctttgggaggccaaggtgggtggatcaccaggagttcaagaccagcctggccaacatggtgaaacccgtctctactaaaaatgtaaaaattagcagggcgcggtagcgggcgcctgtaatcccagctacttgggaggctgaggcaggagaaccgcttgaacctggcaggcggaggttgcagtgagccaagatcaagccattgcactccagcctgggcgacaagactgaaactccatctcaaagaaataaaaaagaagaagaaatggataacgcaaaccagttaattttactcggatttataatcaaatttctccttccaagtaaattattagtgtgtggtatcaaatgtgtctggcgaattgagggatctttaaatatcattaagtctttaagactcagagtcggccggcagctgcctgcgtgtctggctgaagccttcctgaactaggctggctctttcttgctcggtttggatgataccaagtaattcaaagtagcgtaacaggggagtgacttaagtctcctaagaattagaaagttgccttaattctcaaagcctcataagtaatggaggacgttaaatagcaaagagtataatttaaactgggctacaattaaatgtgtgtgtggctatgtaggaatgaagcgtgtttcttctcctcctgtactctccctctcttgactgcggaaatggaacatcctaaacagtctttctcttgccttggcttagctgtgctgtaggatgggacctgggcttctgtgttgaggtaacttctattgtgaggaagaagagggcgaaattgtgtggcatgatttttttgtatgaaaagtgaagggcctattcttaattttgaacaactgcctgctttctgatttacttttgatccggatttgttggattcctcactgtactgtgtaggttgagcttacaaaggtgtggattttgagcagtgcgattaccccctttcagatttggggttgctgttgtttttgtctttgggtttttataaggcggggagggtaaggggaaatgcctaggaaagaaaatcatgtgatgtatgtgaatgccgacatcgtcataggatcggactgaagcctttctccctctagcctctgaatggaaaccaactcagttcaaactaaatgcatcttgtgcatgggccagatcctcatctgccccgtttacttacataacacatactagtcaatcgaaaatagtgatcctctgccctctacctgccacacattcgtgattgaatatttaacccttgtttttatttggtctgaaaatcaaataagcagttgccacaaagggggaatttgtcttatgtcatccatgatgtgggtccgtaattacttaagcagcccctttatcttaatcctgaacattgaacacaaggaatcctattttgaggccatgaaaatcggttatcgttttattctttgttacctgagtgagaggtgagggtaacggtgggcgagtagatgggggaagtattataatagtaaacttttaatgttattagaaggttaaacatacatttaaaagatttttttaatacataattttttcttttcagttgtagtaaagttcccttataatatggttattatgacttaatattgtttgacatacattcagggcagggatttaactatgtgtggtagataaaaacttagagataaataagaaaacaagcaacaatcaggtaacaaattaacaagtacttttctttaatgttttgctttgtcatattaagttttgtgtacaatttaagcttatgttttaccatctggacaggcaaaaatagtaatctccactcagaaatgaaatcagaatgacaattaagtagtaagattttcagactttgtccacagtttgtcaatgataaatattagggaccttcctactgtaaaaaagagaaggggccccacaatatttatggggatacatgtcattcatgtgccacatctaaattaatagagtgtattgtgcacctttaatagtgtcacttggtttttctgttttccttctataataaaattctatagaggtgactcttgctgtctcatttcctggcagctacaaaaacagcccaaatatctgcttaataaaaaagccctttgttgtctatgaaggtcttaaggctttccttgatcttgttatataatccatgacgatgttatttgctgactttgggggaggggaagaaatgccacctgattcatagttgtcataaaaatatccaagattctctgcatttagtttagcaacaggaacgagggaacagttcacaattgtgccacagaattattacttcccaaaactcctgcatggactttctacctgaatgttgtatgcagttgattcatttatcaactgtatgtgcctggattgtgaatttcttgtttttccccctcacattaccattatccttactaccaaaactaaaaaggaggagagagaaaattctctgaaattgttcttgcttagccctgtacaattagccatacaatttgtaaaaggaatactttttaagaaggtttaaactagtcactacttttcaaatcagacattgagatggtcaggctgcctctgggcttcattattttatctaattgactgattctgaattcagtcctacaccactgcactcagttctaaaagcaaggctttgttttattctgggtattacctggtaaccagtcaattaagaacattagtggaactctgaagggaaagcacttccataatctctttggaatccagttgggttgatgccagttgctgtgtattggaaaagagaaggaggaatcaaccaattagagcccccttttagtgcttgagaaaccaacaataaagagcaagtcttaattctgaagagcagccctgattaattgaaatataaataacttttaaaaatctaacttctgctggctataatattccaaataataaatgtctggcatggttgactaaatagaggtatttaaaccagctgcctgatttctttattgtaatgatcggaagttgttagcatataacagacttttccaaatgttacgaaataaaaggagaagtgttcagggttgtgttcaaacctggtttggccactagtagtgccttagattggtcacttctctctagacctcaatttcctcacctgtaaacggaggggttgaacttaatgatctttacattaccatcagcaattcagtcttacattacaaaactggaggtacagttttatattttaaaactgaaggtttttatggtgtaatgactgaaagtagcccatgaatatcatgtgattctgggtgtggcagtatttcatatggagtagtttgtataagggctataatcagagatcagatttagtcggttgagtgaaggctttgggtctaaactacatcttttctttttgagataggcctaaaaatattatgtttagaaaacagttgtttaaacttggcctcgtgaaatgtttttgttctccatttgtgaaccatgggcctcttcagccatgggaattatttgatagagcctgtgaacccattagtgaccaggcattccagttagatgatagatgtcacttgtgtatgcatgattatcttccaaaagcatgtggatgctgatgtaatgcaattaaaatacatttaaaggtgttgctgagttcatagtagccttctgatattaagatttttttttgtttttgttctgttttacttagggtagagacaggggtaggagtcttcagttattattatggaggaaagcctctctgaaatattttgatcaaagtaggtcttaatagttattacaacagattatgaaatactgctctagagaacttccctaatttttctgctttatactcttgccattagaatgctccttgttacaaaaaagaacataacataaaaaaggaatttaacagaggaaatggtgaggaggaggacagggaggagtgaggaggctactgacgctctcctaaattgtcctctccaccaagtagcattttggagcttcctgacatctgaagccatctttattcctttgtagcagggttaagaatatgggctgctgaggctacatcctgcatgatgccagggggtagagggagccatctgacgagatgggtgcactccgtgttgtataacatggcagttcttgttaggagggggaggcaagtgctactaaagcctctttaagccacatggtttggaagtgtcttatattttagcttctgcttatactccacctccacaaatatttgaacatattcaatgtgccaggtagattgaaggatagttttgatgctgtgctgcatttttccttttcgaggtagacctggacattctgtatgggaagcagcattaaccagtttcaagtgaaagggtgcttacctctgataccatttctcttttattcagtgccccttctgagaattatttgtaacccagatccttacggtaacctgttatgtgagttttgtggtcttcattttacagttgaaaagaattggagatcccaaagatgcaacagcttctgtaaagtcactcagattcctggtacctacaagggtcaatataggaggaacacacagcttctggctcctggttcaatggcctgagtatttattgtgtagcctctgagaaggaaacaaacataagaaaatggaaacatttttgtctagtatgctttgacagagggtaggcattcaatttttttttctctttctctttctttctttcttttttgagacagggtctagctctgttgtccatcctggagtgcagtggcacaatcttggctcactgcagcctccgcctcctgggctcaaacgctcctcccacttcagcctcccaagtagctggaactacaggtgcctgccagtgcacctggctaatttctgtattttttgcagaaatggggctttgccatgttgcctaggctggtctcaaactcctgggctcaagcaattcacctgccttggcctcccaaagtgctgggattacagacatgagccatcatgcctggccaagatttcttaatttcaatttaggagatggtacaaaatttaaaaatctgtattttatcataatctatgaaagattcacacatcacagttggctggtttcatactgaagtgtgccttattgggagtggaaacttttccaagttgacttgttctcttccctgattctgattcaccagatttgccatgggacttaagcatgtgcattcttcatgtgattcagatacacttccttcgcttcccacccccaacttttgcgctgctttggatgtatatgtaaagtccagagctgtctgaggccattcatacaacaaatatacatcaggcatctactgtgcaccaggtactatggttgttgggatatatcagggactaactaaaaacaaaggttcctggcttcatgcagcttattttccaaataattaccagacatctttgaatatcctgtttattatttaatttagaagattaataagaggaaaagtaagaacccagagtattgataggagaaaataggtagtgggccttctgagaaataacaaaaggtgaaattcttatatcagatataaaatgcaagtccatttttcattaaggttcagaaaagttgtcagaattcatgttaagtaagtgactagagttaatgatagataggtctgtatgcagaaagccaactagtgactttgcagattgctttttggggtttggacttcagtaaacagttttaatgcaactttttatcagtgtagtagcattctattttataaaataatggttataaataagaaactcagtcttaattctctttagtttctgtagtcagagaaaagtctaattagatctcttgtggcttctctctcttatctctaaagttctcaatcatttacactgacttagcttgtggtccctagagatttcataagtttatcttggtgtttttttatgttcatgtcagcacagagagccatttgtcaaaattattttcaccttggggccagttctttattcattggttcttttaatatatgtctcttgtaacacatgcttcttttaagcaaactttttgcaaggtaggagaattttaatttactgccttggctttttttctggattgctttaattttttctactacttggtctgtttttccacttttctttccattatatttttttcacctttttttttccaactgactttggctggcttagcttggacaaaaactacacctagttttgccgagttttttagagcttaaaaaattgccattaatctctggtatcataacatcctcttaaggcaagttatcttgttgctctgtcctctaaatgtagcatctagagtcagaaggcttctggcaaggataaaaatagccttcctgcttgctggtttgttgttagctttactggcagtaggaaatcttttgaattccttaattgggtcagcttcttactagtttctctctggacattcccttctgcctgaaattcttagatgcttttagatcttgcagcttcgcacctgccccgagttgtagtcaaagcagtccttcccttctatgaaaccttcctccatctgtagaaacatattccattgacctctcccatcttacagataagtgttattttcttttgccactactacaatctgtttttcaatcatcatattacaattgaaacattaaatttggggttttggttcaaaatgaagatcctctctggttttattgaaaagaaaaattttaggttgaatttttgaagttttcattaaaattattatgtatctttgccagtttggctttgatgaaagtaaggggttaggttttgttcttttctctcttcctgagaagacttatatccctgtttttaaccaaggacactagcaaattctcatttttctgaagctgaaatatcccccagatttgcccctcccttttccaaggttccagtttggaactttttggccaaaataaatcctacttgtcctttctcttacaagtggaaaattgttggttatcttcggcttattactggggaagggaaaggaattaattttgttaagtacctactgcatattgagggattttttttggcattctgcaaacattatctcaagactgtctcacaacagctctgtgaagtcaatggaattatctctgttttcctgaggttcagcaaagctaaataatttgacttaggtcacaagatgataccggcttgactctacccattacactgcatcttccatggcagagagatcatcaactgctgactttgcttcattcattttccacagttgtttattgagcacctttctctgctccaggctctggggtagcacacccaaaatccataaagatctcattgccctacagcaagagattaaaacaagtaatgtaaatatggtgtaataagtgtaaagaatactggaaggagtacagagggttatctgaatcaaagcaaggatgatgtggggcagggaaggcttctcataagatgtgaggcctagcaggggaactgctgggacaaaagtgtggaggcttgagtggtaagacattgaggggcagagagagagaggagggccttctaggtagagggagttacccagaagttgaagttatgggccagcagttctgaatggctggagtgcctgatgtgggaagggaaatggcagtgtggagagttaggaaagccattaattcaaagatttttgtaagtactggcttttgagctgaaagccaaatttgtagcagagaagggttttgtttagcctaaactctgtgtgtttagtgaattttaagtggctctttgggaggggacaagactcttcagctgatatctgtctcagccagttccttctttgtgattttgcatgggaatgtctttgttggaagttggttgtagcacagatagataagggggtagaataagcttactgattttgatttggggagttatttttgtgtcaatacactaaattattaaaaattaaatttataccattaaattatagaacatattgaatgctgttttgttcatattgctatgtcttctgcatttgtgtaagtatataaagttggcattcaaaaccagtggatttattacacatttcttgagctttgctgtccgatgtccaggtccccacagcgccatcttgctgcaagtctcaagtggagtttgtaaaaacagaagatgtgcaggggtaggaggactacctcctttaaaatattacttatgacggtatagttttgatttacttagatgtgagctaaacaaaattagcaggagcagaggtaggagcagcacttctagttaggcaatcaacaactgcaaatgtatgtgtatgtatatatttgtgtgcattagaaatttttaatggtgctcactgaagactcctctgcaaacaccctgcttttctttggagtatccacatttttatagggtgaatcaatcaaaagttgatccttaaaaattttatgctacttgtcactttagagttattccctattatcattccttggcctgcaccatgttgtcaacattgttggcatgactgtgaaaaagaaaagcttatagatagcgtgaaatctaattgtgctgcagatacatttgatactttttggtgtttgtgtgtttgaaatggcagcatttatttttattatttcctgttgaattatcagtagtagtaatatctggattattctttagaaaataacttattttacctaattaatgaaagtaatacttatatatactgctaatgtaaaggaggatttcctctggtcttttctccttttattttttgacttggttactttagttagtgtcttaaaaggatatgatagtacatactgttctttttagcacctcctgcccccacctattctaagtcagtctgttggtaaatattggttcttccaactggcaaatgcttagcatagaattgcctagttgacgtatggatcttttctaggttgtaggatttggtagtgtagatccccagagtcacactgtatctgttgcctatatttggctaggttgagtcatgtcaccaaatatagcctatgccttcggcatgatgtatgccaggcttctggttccaaattctgcagctggcctccagagactactgcttttcctgtcataatgttccttaagattagggctgctgaccaggcagtattttttatatttataacaaaatcaataccaagagccttcaaagattgaattttgctcatcaaataggttcacatgctgaaatcctaatgccttccttctccctttagaaattaaattctgaatgtgcccaaacctggataatgattaaagatagatgagttcttggctgggcaccgtggctcatgcctgtaatcccagcactgtgggaggctgaggtggaggcatcacctgaggtcaggagttcgagatcagcctggccaacatggtgaaactctgtctctacaaaaatacaaaaaaaattacccgcgcatgatggcgggtgccagtaatcccagctactcgggaggctgaggtgggagaatcacttgaacctgggaggcggaggttgcagtgagccaagatcgtgccattgcactccagcctgggagacagagcgagactctgtctgaaaaaataaaataaaaaagatgagttctcaaaaacccaaccagacaaaacagcaggcaggtactgggttatattaatattcagacatctcaatttttattttattatactttacttatgaaatactggtgttttgagttcagtggaatgaactcatcaaatgctcacctggtacccaaacaggacactcaagatgcctaggtattaaaagctctaattccgaagggggctttaatgtaaaagaggtaagaaggttagccagaagctgaaatgattaggtaagaaagttagttgttgctttgtagctacaaataaaatttggtgagttcattaaaaagatgtttccagccaggcgcagtggctcaagcctgtaatcccagcacttcgggaggccgaggcaggaggatcacgaggtcaggagttgaagaccagcctagccgggtatggtgaaaccctgactctactaaaaatacaaaaattatctgtgtgtggtggtgctcgcctgtagtcccagctactcgggaggctgaggcagaagaatcgcttgaacccaggaagcagaggttgcagtaagctgagatcgcactactgcactccagcctgggtgacagagtgagactccatctaaaaaaaaaaaagatagatttgaaaaaatccttgagaaaacttatgcctacgcaaaagcctgcgtgcacatagatgtttatgacggctttattcataattgtcaaaacttggaaaaaccaagatacccttcagtaggtgaatatagattagtaaactgtgatccatccaaacaatggactattattaagcactaaaaagaaatgagcaatcaaaccatgaaaagatatggaggaaccttaaatgcatatgactaagtgaaagatggcaatctggaaggctgcatactttatgattccaactgtatgatagtctggaaaaggcaagtctgtgagacaataaaaaggtcaggggttgggggctggcgaagagggatgaatagggggagcacagaggatttttatggcagtgaaactactttgtatgataccataatgggtggatacatgtcattatacatttgtccaaacccacagaatgaataccaagagtgaaccctaatgtaaactgtgaactttgggtgtaacaaatgtataggttggtgcaaaagtagttgcagtttttgccatcaacctataccactctggtcgggatgttgataatggggtaagctatgcatatgtgggggcagggggatatcagaaatctctgtatcttcctctccattctgctgtgaacctaaaatgctctaaaaaaatgacgtttatatatttatttgtaagtatgcaaatatgcttatataaaagcacatatttatatatcaacataaaaatacatatatacgagacacacactcttcattgggaacatggagtgagggccactgtctcaggcatgggaggggattatcaactagctagccatggaatagaaaagctatagaaacttacaccaatatagcagagaggatattagaacagaaataaaggaaaaagtacgagagtgcaaaaaggttgtagataaccaaattcccatggcacttttaatggaagcttttggaggatttccagaaaggaaatgatatgtgttatccataatatgatggacaactctttagatattttagttgtggagagaatttacggaagagtagggcacacaagttagggaagcattatgaaagttaaaaaaagaaaacagtttcttaatgtcacttatgttaaaatttaagtagaaagaatagctgattgtttaacagaatgtcacaggtgtgtttgctactagagaccacaattgattctaacctgacaacaggaatcatatcacaaggccggatcaaaaaaattaaaaacaagtatcactttcagagttcaactgtgaactttgccagtgatttttcagtgtcgcattgtgtcttagctggagggtagaatgactgtaacttataaggccaagggacagggaaagtgttaaaggtcacctcctttggttgtgggaggtctcttcaggagatatgggaagagttaatctcataatagagttaagagaccgttttgttactgtcaagttgaaattttctctttaaaagatacccaaaacatgagtttgtgataaagtggaacttcatttgtgaaacttcattgtgaaaccagcctgtttagtaattgtcttttggattctcattgttcattatcctcccttagggctgggtgaggtggctcattcctgtaaacccggcacttgaagaggctgaggtgggaggattgcttgagcccaagagttcaagaccagcctgggtaacatagggagacccccatctctacataaaataaaaaattagccaggcatggtggcatgcattggtagtcccagtcacttgggagacttgaggtggtaggatcacttaagcctgggaggtcgaggctggagctgagatagcaccacactgcactccagcctgggcaacagagtgagaccctgtctcaaaaattaaaataataataataatagtccttccttggcatcaagtaaaagggattatggttcatatagaacagccttggtttctattgcaatgttagcattaaataattagaatatcttcttggagataataagacatttcctcttaatatttcaactaatgttatcaaatatttttgtctctatattgatttagtcattcttctgaaaatgttttatgataaatgaaagtgtgatagctcttattcatttactagagagttttagaagtataaaatctctatatatgttccattacagaaaatcagctgctacttttagttgtgattcagaaacagtactctgttcccacctcccaagtttttttttttttttgagacagagttttgtgcttgtctcccaggctggagagcagtggcgagatctcagctcactgcaacccctgcctcctggattcaagcaattctcctgcctcagcctccccagtagctgggttgattacaagcgtgcaccaccacgcctggctaatttttgtattttgtagagatggggtttcaccacattgaccaagctggtctcgaactcctgatctcaggcaatctgcccgcctcggcctctcaaagtgctggggttacaggcatgagccaccgcacttggccctccatcccccaagtttttaacagggtcatgttcttgctcgtagcatctcaagtctatccttttaaaaatacatacttgtgacaggccatagatccaggctttagttaaaaagtagcctagatagaattcagtagatttgggtgcttggctatgtacattagaagtaaagaatgaaaccaatttttaggaagaaattgaaatgtcaaaattaatttttacctttttttcttccatctccattcctacctccactccctacataggactaagctgaaatttaaatggaacgattaccaacttagtttcttttaaatcctttcatttggttttaaaattgtaggaaaattggcagccgggcgcagtggctcactcctgtaatcctagcactttgggaggccgagacaggtggatcacaaggtcaggagattgagaccatcctggctaacacagtgaaaccccgtccctactaaaaatacaaaaaaattagccaggcatggtagcgggcgcctgtagtcccagctacttgggaggctgaggcaggagaatgaggcgtgaacctgggagacggagcttgcagtgacccgagattgcgccactgcactccagccttggagacagagtgagactctgtctcaaaaaaaaaaaaaaaaaaaattgtaggaaaattataaagttcagagtttatccagacttcaagttttggatatggattaattaaagctgttggcaatagagaatagtttcctcttttcatgccatgagttcattactatggagactgtttcaaagaagcagcattttaaaacattgaagaccttaagttcctttctaaagagttgttaatatgtagctgttggattgatgggaccccatgttagctctggttcccagagtatttagtggaactagctagagtccttgctggcatcctggaaggcctgccccagccgcaagccattggagaacctctgtttatccgttattccttagcttttgagagtcatggttctgtggggtcagagttcagactgctgtttcctaaaggaatgtttgtagttccgagtcactttaaaagtcctgttctaaatcctgatttatagaaggtgggactatagtagagaactaacaaccaggtccccctatccattccttagatgaggaagacctgttgagggttcttcagtcattcttctcaaggtgggtgcagatggcatgtgggctttggagatgtaaaagtgttgcatgatgattcttattttataacttacagtatagaactaggtccatatgtgtactcagtaaggatttgtagtgtagataactcaacttacatgtaaaactcttccaaaacagaaatgtaattccttcaacatagagaaatcccagtgccattccccccgccatgcatttgtggctaccaatttggaagacagttcatccaacaaaaattttagtaccttcacaaattcttttttgaggggtatcttgggtgcccattttagtttcaaaagtagattttgacacacttcaaaattcagaggaaagtaacccagcatttagtgagtgcctactgtgccctgggcttttgatatttttcatcatatgtaagtttagtgaaatgttcttcttccctctgagaatatttccccaaacctgaaattaaacccattagcctgtctctacatgtaggcataagcctggcacttttcttatgaatcacataggagaatattactgccaattacatagtttcaaaagtaacaaaacactacacaaatgaagaaaaattttcacatttattggggcagaaatgtgaagattgtcataatgagttgctattacataatggtataaagaaaattaccttggatggaaatttgtaaattagaaggacctagttaaatatgagagatactttcttttcctactttcaaacttttcctttttgaatattgatgaacatgctgattgatatatcctctgattcaaataccttgcctatttgaaagcaagtcaattcagctctgttattgaataagtttaaaccatctatgaaaaaagtaaacttagtaacggccttcttttaccttcaggtcgtctaaactattcatatccaggatccgatagctctctgcttattaatggtaagtgataattgatttaccctagtgaagtgcacaaaactgatacagtagttgtgcttcagcagtggagaaatgacattagtttgttctgtaatgataactgtaagttgctattaaactatcagctattttaagaatgattcttttagctcacaattgtggcagaaacttttctttttaatatgagggccaactgattccctgtcctgaacttggtgacaatgagaatgaaaatcccataatgatacctaaagattggctttatctaatattagcttctgtagagtgacctttgaaatgtcaacataaaagccatttccacgtggctggaaaaatgttccaagaggaaaggataagcagagatctaaaaccagaaaaaggcagcctaaaaccacagtgcttgacattgcataggacaaggtcatttgctgtttgctgtctaacaaaaacaagaaacatgaagttttattggctttccagtgtcttcattagattctcctttcctgtgctaatgttctgttgagttctctttttatgcgcatagtgaagcaagctaagtttcaccaggaggagggaatatccactcacaagaattttagtgtctgtttttttagtatcatggtctaaaacaattgggtgaaatacagaggtcttgtttacttcttttctactaatttgctatggaatgtggatttcaaatttctgtgtgtagaaaatgtcttccatttgtcaaagctcattttaagtcccacgacctctaagaagtgttatggactaaatagctatattctcataattcccaaaacaaataaaaataaaaattcttccactccttgattttagtatgttgtgaatgaggagttaaaaattatttttataactggatctccttttgaaatcaatatgttgaaggattgttgagccaggagaagttagcaggagatttgatgtttgagaattgctgggtacatcagatcttctagagactaaatagtttataaaatcttacttggtcatcagatgtaggtcttttcatgctacagtgcgagaaataataccataatgtaatattctagcataaatatattaggccaaaaaccaaacccagtggcgacagtggcatcaggataaggagaacataagggatatatatatacatgcagaagagtttaccttttcctttggaactagttcaagtcagttccaagtactggaaattgtagtgaaccaagattggggatattactgtgtcatcttaggcaaagtgatcaactcttctttgtcccagtttccttatgaaggtgttcctgttggattagttgcctctggggcccatcttgttgagggttgtcgagaaaaataaactctctctagtgggttttccttaaagctaaattcacttaactaggaaaaaaaagccacctgtaatcccagcactttgggagactaaagcaggaggattccttgagtccaggaattcaacaccagcctcggcaacatggccaaaccttgtctctacaaaagatttttaaaaactagccaggtgtggtggcacatgcttgtagtcccaactacttgggaggctgaggtgggaggattgcttgggccgaggaggtcaagggtgcagtgagccatgattgcaccactgtactccagccacagtaacagagtgacaccctgcctcaaaaaaagaaaaaagtatactattatgagattgcctttccttttttcttcattactatcctttctttcataaataatttttaatgatcttacttgtcaataaaaaaataaaagtaactttttcccaaaatatttatgttttcaaattttactggtccatgaactttaagagaagactagatagtttttaatgttgtatacgtggaaattttgtttattataaaggcatactgacttgggttaacattgcctcaaactgaaagacatgaagataaaggacaaagagagatgtctttcttctaagaaacatctcttgctggctccccaagcaagacccgggagtgtggggtttacagttgccgtggtctcaggtctagtactgagcttcatggggccccaaaacttgattttgtcagatttgatgaaggattagttttttagtaaccaaccaactaggaccagatgccaatttattcatttataatgaagcataaaacttccaggtagaccagatgccagaggtgactactcgaccgacctattctctctccagtagcaatgtccagattagagcagaagattgcttgaaagtcgtgaaattaaaactaggtagggaggagaggtgttgagaattttttagtgaccttgatcaagatatgcacattgtccattctgtcagtcatgtttgtgaaatatcttctagagtggatcacatctgtagacaaattaacctcattcatgtattcattcttagtagctttgctctcactttagctcaggttttgggggtacctgtattgcaaatctggcataatgaattgtgcttagtgaagattaattaaagaatttacaggtactacccatcacatagggttgtggtgaagattcaatgtgtgtaaatcacttagcatagcacctggcacgtagtaagtcaaaataagagaattagaataagtaatatttttggttaggaattaatctcattcatgtattgattcttaatagctgaaaatatataagaaaaaaatacagaacaaaggattaatatgagtttgcaaaaattgttgaaagttgaacatgctttcattgtctgtcattaaggtagataatctaaaactatgcactttcaaatgcattcccttcatgtcttgtgtccatgcagccttttcttaaaactgaaaataaaagcctaatctattatgtcactttatagtcattgtttaattttaagactgaaaggtgctgtaaggagctattcttccttgtccactgtaatctattcaggcttttaaaaacctttaataaggtgattatatagccactctgctttgtttcaatgtaactttcagagctttttcttccaagttatctgttgaaagccgtttcttgttttgtttcgataaaaatgtagagcagctgtttattctctttctcacatgaacatttgaattttgactctctgatttttattttatgctttattttgaaattttcaagcaacctcaaagcttttagaaagaggtttaaatcctcaataaacagaaagaaaatcccctcaccagcctcttattggaaaaattataacaataattaaaagaaaaaagtcagagtcaccaaccagttttcagtggtttatattggactaatgttgtaatttgcctttacaaagataaatagggtgtattcatccatggatcaaattatttttttgccctgctcgatcatcaatttcctacagtttcatacaatgaccttcgtataccactcatgttaaaaggcagtgccaatataattcaacaatgattggtaattgtgttaagaatgttacaattcacactctagggaatttttcaatttattgctgtgttaatagttgtagagatttttttgaggggcaatcttggggacagttcttggattttcaatgtatttttaaaaccaaactatctaaagctactttttgggtgctctattagtttgctagggctgctataataagtaccactgactactggcttaaacagaaatttacttcctcagttctggaggctagaagtacaaaagcaaggtgttatcagggttcatttattttgaggcatctctctatggcttatagatagctgtgttgccacatggttttccatctgtgcatgtctgtgtcctgaactcttcttataaagacaccagtcatattggattagggaccacccaagtgacctcatttaaccttaattacctttttaaagaccctgtctccaaatatagtcacattctgaggtactggaggttaggacttcaacatatgaatttgggcaggagggtgggggtagggggtggccacataattcagcccataatagatgccttatactagtaaatttcatgtagtagggatatagttagaatgcccattttatggttatgagaagcaagcctaaaacttagtttcccagttaagtgagaagaagtgttaaacataggctagttacctcaaattcctctggagtatcttggcttagctctgagatagacattggattaaaagattagttttcctcttacccagcttgaaactttattttacctaagaaaccaccaccacctctgtataaaaatgcttgtgcattatactttttttttttttttctctaacctttcattctcctgctttagccctcaggattagctacttcaaaaatgaaccttgtggcaggagaaagttatagagcaaaaaaaacgtgttaagttttaacaactcatatatgtattttctttcctttgaggaagtgattagtaagagatctattaagggtagcacagaacaacatttctttccttttttttttttttttttttttgagatgaagtctgttctggactgatccagactccagtctgatccaggctggagtgcagtggctccatctcggctcactgtagcctccatctcccaggttcaagcaattgtcctgcctcaccctcccaagtagctgagattacaggcacctgccaccatgcccagctaatttttgtattcttagtagagatggggttttacaatgttggccaggctggtctcgaactcctgatctcaagtgatcggcctgcctcggccttccaaagtgctgggattacaggtgtgagtcacctcacccggcccaacatctcttaattatagttttttggaatgaaaagaggaagattgtttgcttgggagggggaagaaatctatcaaaaaggaaggtgtaatttactcaagagaaatgtagatgatgatcacttactgaaaatgtgtgtaatatggttctagttgctacaataataagcatgttgaaagatcccttcattgaaaagataatatgaaaacaaactgtaaactctaaagtgctctacaattgttaaccttaaaatgctaatgaaaagctgagaataattgttgaagatcatactcagaatatatgcatatgaatttacttttgggaaagggagattatttattgagtatgtgactgaccattacatatacacattgtgtttttcattattctctcatttgcttcccatttttataaataaagaaactgagggttagggacataaggaaactagagttgcattctctgctcttttctaaggtaggccttacaaataatagtgtctttatcatatcttaggaacattctttgaatgttgttgtaccaacaagctaatataagcataagccaatgtgataggaatttctaactataaagcaaatgtaaattaattttgtggcagtgagcctattaaattagggattaatttataaaatcatttaaaatggttctttgcatctttgttgaatcgtatgctttggtctttgtgatgattgtgtctgctttttggttctaccatctttattcttttgttcacagattaattccttttagcttcaagcctttgatttatatcttttcaactgatttactaatttggctaatttctacactcctctccccatatattttcttttagtcctcctggaaaagtcaggttgttttgttttgttttgtactgttttgagacggaatctcgctctgttgcccaggctggagtgcggtggtgcaatctcagctcactgcaatctttacctcccgggttgaagcaattctcctgccttagcctaccaagtagctgcgattacaggcatgtgccaccacacccagctaatttttatatttttagtatagacagggttttaccatattggccaggctggtctcgaactcctgacctcaaatgatctgcccacctcaacctcccaaagtgctggggttataggtgttagccaccatgcctagccaaaagaagccagttatctgataacatcttatcatctgagctacaccccccttttttttccagatagaattgctatttgtcttctcaccttggggcagagagaggtgcacagttggagagcctaaggtagatcagcgtaacccgaataggatccgttttttcattgtccactaaaacatagtaatatcttatccttcatggcctaaagtcctattcgtgacagaattgattaggtgctgtcatgtaggaaagtatgcttttgtatgaaagtaataatgtcatttgttcatttttaatattagtaccaaggagaaaaccaaaaagggttcattaacaaatatagcaatatagcatatgcaataataataaattcaaatggtacaaaaagggataaaacaagaagtgaatgccttctttcctctttctagaagtttctctctccaaaggttcttgtggttgtttctagaaaaaagtatttcatggccaggcgcaatggctcatgcttacaatcctagcacttggggaggcccaggtggatggatttcttgagcccaggagttgagaccagcctgggcaacatggcaaaaccccatctctataaaaataaaaataaaataaaaagtaaaaagattttatgcatagtcccacatatctatttatattttctttatttttaaatgtacacaataaggattctacaatacacacttagacactgcatgcaggccagcatcttagagagctttaggtacatgaacgtgagccacatttaaaaatgccacatgctcagttaatagggttgctcctttgaaatacgtacatacatacatacatacatacatacatacaaatgccacctactaggtgtttcttcttttgaatgtgtgggtactttgtttctttttgattattacaaatgttgcaacaaatgagaaaaaagtactttttatgggataaataatattttatttttataataaaatgtatggggagggagaaagtcaggggagccctgacaagtctttctgtaccttcttcgtaagtctggcattacagattaatggaacattttgctagagggaatttgattctgcatatagggctaataacaaggaaaggaagcatttgtaagcaatcctgtaaagacgttttagaaataaagtatatcaatagatctaatagcaggtatccagaagttataaaaatttatggccataatattttgagcctttttttttttttaacaatcttgaatcctgttagttctgaacattaaattattgaggactttataaatcaaaactaggctggacacggtggctcacgcctgtaatcctagcactttgggaggctgaagtgggcagattgcctgagctcgggggtttgagaccagcctgttcaacagggtaaaaccatgtctctaataaaatacaaaaaaaaaaaaaaaaagctggatgtggtggtgtatagtcccagcgagactgaggcaagaagaattgcttgaatctgggaggcagaggttgcagtgagctgagatcgtgccaccgcactccagcctgggcgagaatccatctccaaaaataaaaataaaataaatcaaaactaagaaataatacaagtggataaacatataaatcgtaatcatttaaactttggtggggactgggagatttttattcagtggcaagagcatgcatctaaacaatctttgaagagtctactttttggtaactgaaggaaacttctgagcagggttagtttggctgacttagaacttttccaaaatgtagatttctttgaacataattaaagtcattttttaacttacacttcctcggatatttgagaaacatcaaataacaggcaatacttgctagtcatgagattggaaatctgtctgacattttcctcaggaaagcagagaagttctatgttgcaagaatttcatcataaagtgtgtgccaatataatttgaaataagtgaggaaaagtgcttagtacatcttttttatgtaagataaagtggcgttatttagcattctattaatgtctgggttctggttacatagatctgttcaatttgtagaaaattcattgaacttatggtttatttttgtgtatatgtcatatgtcaaaatttacatgaaaaataatgtataagtattacaataagtggaaataaaaattacacattctcgttttgcatgttccagaatgtcattgtttttatttcttcaatattaatttacattaatttcctgatttgattgggcaacttttatagttgtaaacattattcacttataacctattttcccttaatatgagaaaatatctacatagctttcagaatttaatctcagaatttaaccatgaattattttatattgaccagtttaattttatagtatacaatcaaagtttgagagtgtacatttgaagatttcgagagtatttgattgtaacttttgatccacagcccttactattccggaaattatttatttttgatataatggaagccatgagagttttcatgttaattttgtagctatattataaaagcttattcttttcaaatatctgttttctcagaaatccaagcagcatcaatcaactttttaagattgacagcattaagattttcaaatcgttactttgtttccccagactccctaatctttgaagcagttgtatgaatagaatgttcgtaaacaagcatctgctttgtgatgctatttgtctttctaacctctgtctgattaagtcagaaaatacctacccctccccaaccccctaaacttaagacctattaaagtgaaagcacaagtgcttgagggagattgtatgttgtgtgaatccatttgctcaaatactttggtgaaatccagggctatctaagtgtggcagaaatgtattttggtttgagatataatttcactttggaagatactcacataatatttctgagttataattatttagcatttatctggaagaatgagaataaaaaccttgaccagtttgtgagtttgtatagtgatttcttaaaggagctataccttctaactcaaaaacctatcccaggctgtaaccctgggactttgggaggctgaggtgggcagatcacttgagatcaggagttcgagaccaatttggccaacatagtgaaaccccatctctgccaaaaaaaaaatacaaaaattagctggtcgtggtggcacacccctgtggtaccaggtactggggaggctgaggcacgagaatcgcttgaacccgggaggcggaggccgcagtgagctgagattgcaccactccagcctgggtgacagagctagattctgtctccaaaaagaaaaaacccatcccagtttactgttgaaacctcatccccagccaagtccccacttgttctacatgcttctgttcggccacctttccctgaatgctacagcagcacccctgcgtgtaacgctgttgagcctggaatgcccttcctctgtttttctgttaagggccacctcaaattccctacccccacccccaactttttcatcagagtcagttcttcctcctctattcctgttacacctaccacataactagtataacaataggcatgctacactgttgtttgcttatgtggccttctggcattaaaagctgctagttcctggaggtcagggacatgcactatttactatttatccacaagatcaggcattcaagaaatgttcgttggatagaattgaggtgtttggacaggctgggcttataagtgccagtttgtttcagggaagacattttctcaaaggttttctgatttaaagtttatactgtcatttcctgagtattccagtggattattaattacctttactttgccccttggctacaacctacttggcaataaaaataccaagccttttacttttcaacatttaggacttggtagaagacttgattaggcatagggaactgttggctaaaaggaagttgatgaattgcttaaagatttcatttgttatgattttctcttataagggattaactgaggaatactgtaaagttgttatttatcttctggtggtgaaaaagtcatgaattaaatattggtatatctactaaattgctagttagcagggaattctgagagaaaacgttattaatatggtaatagttggtttttattatgttgtatactgccttagtttcataatagtttgaaccttgggcaacaattacagcaaaaagcttcccataaaacaaataagattcaataaagttttacagtgtccttgaagaaattttaaaaatgcccaaaattgacctcttacctcccgttccttgtttttttagacatttaccaggaaatgaagaatatagtcacagtttttccattttcaaaagctggtagatgaaatcacagttgattcttttgacaatgtttgaaaggttgttttgtttttttgtttttgtttttttctcatttgacatgcagcaaggacatatgggcgaaggagaggtaacattgtttttaacttttaaatgtatcacttgtatttggagacgacccaagcttgtttaatttctaacctttgtggggaaggggagaggggaaatgaagcatagctttgatccttaggtaatttttgtgttacagttaacattttagacataatttgaaggagttaaggagctataaagaaatttagcagaatggtgggatttggatttgaatcaaaatgatttccctgtgttaaatgagaaactcagcttatttatatctaaagatgtgctttttttcctttctgaaaggaatttcttagaaaaaaattaagaatctttaaaaagaaaaatatagtgacactagtcccaaaatacctcattatcttggaggtttaattatgctcaaatgccttatgtcaacttttttcttttcttttttactaagtaaacaatacatgtggtttaaaatgagatgagctaaataaatgactaatcctataaatttcaaacatttgggggaaaagctctagaaattttaggtaattctaaagaatcatttcgtagaggtacctgaataacttattcttggcacctatattttgcctttttacgagaaagtaagacagttaaatagcttagatttaaaggataagtgatttttttaagatcattcatgaaataacctccagttttataatcagtttgtgtcttcacttgacatatgctattataggataaatttataaaaaatatactgttattatttgtgtttagtaatagaaattgaagacaagtgtggcaaaacctggaatgtttctattaaagtaagagcacttgagatacatttctagaagatccattaacaaattcctcatgtagtacctagaagtaaattggcagccagaaaagtgataaaacagtgcttgggagattgtgcagctatttgtagctctgtgttttccttatgatttaaaagtttatattttgctgtcaggtaaatatggaaagactgttacacatattggcatctctggtgtttcctgcatatatattctggacgataagattttcaaacagcaaatttaatgactagtttttagaaatagataatacccttagcaagctgataattacccagctaataataaatatatctttagcatgcctaataatcttaaatttcataagactacacaatgaagttggaatataacattaagtgggttttgattatatcccattagttaaggtaaataaaaatgagtggtcactttaaaaatctacttgttacgttagccagatgtcatggcatgtgtctgtagccccagctacttgggaggctgaggtgggagggtcacttgagcacaagagtttgaggctgcagtgagctatgattatgccactgtactccagcctgggtaaaagagcgagacactgtctcaaaaaaaaaaaaaaaaaaaattgacttgttcattttaagcacattcttagaggaaactgtgcaggctatattgtttgatttttttaaagaaatgtaagtgattcaatgtcttacagccaaatttaatattgagtgtacatgtctaggttgccaatagccatggggccctgccaagggagtacagtcttctgccgactgcttgttaaagtgtgctctctcctcctgtacttcagttcacctcactgaagtttctggatcccagtgggatacttgagtcgccttctattaatatttaactgtgtgctttctctctgactcagttgggactttaagttggtgggaattcaagagtatagctaagtgtttctattattcagtgagaaaaataaaagcagcagttttattgaatctgctgtttccttgtttctttgcatgataatcagtggcaaggaacattttctgttaccgttttttccctgctttctattccaggtcagtcttcactgtttccaatggaagatggattcttggatgatggccgtggggatcagcctcttcatagtggcctgggttcacctcactgcttcagtcaccagaatggggaaagagtggaacgatattctcgaaaggtgtttgtaggcggattgcctccagacattgatgaaggtatgtttagaactgtttatagcacggtgcccagatggtggcacatagtaggaaactcacagatagtgttacaataacagtcttatctggctccaatagtcagccctgcttgcattgttctcttgtcctatcctcctatcatggcatataagattaattcatagaagggaggggagcagagctgtgcaaaccaactaaagcaaggcattggactatatgaaaaggagtaaacatcactgggaaagcttccaagggacttgattattgtgggcatacatgggtactaactgcgtttttgtctgtgtgtgctactttggacaaattcattgatgtattttcctttttccccccacattttatgagtgctccacaaatgtatagttcattgtttaaaatcttagactaagcatgaacttttgaaaaatatagcctacagttgtactacaagaaggataatcttacttaaggtagtaaacaagatggaaggtccctgcttacatagagtttacattttattgggggaaggcccataaacaatgtataaatatgcaagaaaatactggagagcaagtgttgaaaagcacacagcaggatgatgtaaaatagtgatgcagggagtttctttttaattaggtggataagaaaagcctctttgaggaagtgatatttaagctgagacctgaataaggagccagccatgcaaagacttagagggacttgttcaggaatatgctattcatccgtgggtctgagtgaccccaataaaaatcaaagtagcagaccttatagcatatttttggttgctttcctaatttcttttgtcttcgtttcctgagtgaaaatggaaatacactaaatcacattatggagaatagaatagatttctttacacatgtataagatctaataaataataaggtttaatatcttcacatttagattgggatcagacttatcaagtcacttcattttcttcaagatgatttatcttttggaaggttgagacagaaatggttctaaaaagccaaagattgaaataaacatagaggtttttgctttttcttgttgtccacaataaaatgtcttggtggaagctatgctgaaatttcagggttctctgaatcaatctccatcctgccctcagcatagcttgaagaatattgtgttctgcagaattgtgcactaaaaattacagggtttatgggggaaaataaggttaaagacaaatcatttaaaagctaatgaactttgtacctgaagcactaacaagaagagaattagtaccttggagataacttggacaattcaggcaagtagctcagcatgcttggggctgcttcagggaatattgaaaatgtacaaaaccaataaagcagaaatgctggcttgcaagcatggagaaaatgcagatggaaacagacctttgaacacctgaggaagcgcaaactaaactgtcaggagataagagccctgcaaggttaggggcatagctctctgacaagagaattctggttgctgcacttatttttaattttcttacaatagagctgggagggtttgtacctgtacgtcagacaagtggggggctttttcctttcctgatgaagtttgtaattctttcctcactatgctagcttaccttgcctaggaaaaatcatttatgaaccagtacaacttccatgttatactgacattgttccctgtttactagactcacacaaactaaacttactctgctcacactacgtattccaaactggaatatcaccataatggtgcaataccatcctgtcctaccatgcgcatgttaacctttttcccccccaagataagggctcacatagtgagcccttatgatacctatgagaataggtatcgtagaagagcagactagactgtttcacagtctggggaagatgaaaacagctctgccagactggaatttaggcatactcctcatctttcttttctgttcctttaccctgccctattatcaggtcttatctacacatgcttacctactctttctagaagtctctttgaaatgtatttttccataatctcattagtgtccaaatgtataatgtagcataatttgtatcatttaaattgcaaaatgtggtcaggtcttccttgtctatcattttttcccattcatccctttttcctctccctctaaggctgagatattgctgtcaaggaagtggattggtgacagggaagaggtctcaagtggaggggatgtgtatgaatgtatgtagagggggcttgctcagaggcctgagcagcagtacgtatggtatccaagaaataagggcgagaagacccaaggcacaaaggtagaaggtagaggaggctataggggaaagattggttacattgagcaaattaataaatgtctttacaggtattgggagctaggtttctccctgcaaaaagagaatataaaaatagaaaggcggaaggctagaaaaacccatgaaatgttggagtcatattgaaaatatcaatatgaactcattagtttttgtaagtacatacacagatacagaaatagttataaatttgtgtttgggcgtgtatttctttatttcctagcttccttcactgtgaagacttagaaataatgaatactcactagcagtgagcatatagagcacctgtaacttagtttctaaataccttttgccactaaaatgatcagtacatcttgaaaaaaaatgactgattcttgggctgggacagggaaagaataagacgagcccggagtatcttcgtaggccagaaagcatgaaagtgcttaagaatggaggcaagaagtgcgaaggacatgggagcctcccacgcctaagggacacgcaggacaaaaattgtcccaaatcagggacaattttggggacaaattgagcatcaaaataaatgagtgaattggatcacaacccattgaataaaatagacccaaactgatatcaataaatgaataaatcaatgggacagatggaaaactcttctactgcacaatactaactaatatatgtagaaggaatgatggaaacagataatcattatttggcaaccattattgtggtagttaatacatgcaggagtcttcaatggatgccaaggctcatgaaggaacaggatattggtgagcaacacaatatactcttgtagaacgctaattgaatacaaaaggagaaaaggtttgcttgtggtagagaaaccaggcgatcaagattaacatgccctccaggtgtggtggtatgcacctgtaatcccagctacttgggaagttgaggcagcaggatcacttaagttcaagaacagcctgggcaacatagtgagcccttatcttgggggaaaaaagattaacatgctcatggtaggaaaggatggcattgcaccattatggtgatattccagtttggaatacgtcacatgattctgctcataggagggagagcacagacccaggttgagggtcactatcttaaatctgttcaggttgctataaaaaaataacagacttggtggcttataaacaactgaaatttatttctcaccattctggaggctgggaattccaagatcaaggtgccagcaaattcagtgtctggtgagggcctgcttcctaatagataataatcttcttattgtacactcacatggcagaaggagtgaagggtctctccagagcctcttttataagggcactaatcccattgaaaggattctacccccatgacctaatcacctaccaaaggccccagctccaaatacccttacattggggaataggtttcaacatatgaattttgagggaacataaacatttggaccgtagcagtcattctatagaatgaatatgaaagacaagaaagaacatggagctgttccaagttgaaaaaagactgatgctctgaggatatgataattaagtgcaacctatgttctggatagcactgtggatcagaaaggattttgaaatttaaatgaagtctgtgaatcgcatagtagtgttatatcaaaattgatatataagggagtgaccctgctttgagcagataccaatagttatgtttgggattacagggcaccatttcagaaaaagatgctggctggctggcttggttggatggctagattgatttgtgcatatgtacagatagagggagaaagaggaagagagaagaaagagggtgaaggcagatgtgcaaattattaacagttggggaatctagatgaaggggataaaggagttctttttactgttcttgtaaatagtagatttgaaacttaaaagaaaaactttcaaaaaatgatcataaaaatatttaaatctactgttttcctttgttgtttattagatgagatcacagctagttttcgtcgctttggccctctgattgtggattggcctcataaagctgagagcaaatcctattttcctcctaaaggtaattctcaagattcattatacttatgtaatttattcttacattgtttaatgtgtagccttttcataaatgttcaccttcactgtaaaatgttgcattgttaaacttgcattttcccaaatgctctttaaaatttcaacataatattcttttaattcaaatttaattttactctaaaagatgcttcaagatactaccaaaatgaactgtatgttgatgtcatcagacttttggtataaatattgttttaatttttttcctattcctttttcctttctttagttttgtgcatgattcctttcccctgaagaattaccaaaaaataggaaaacatgtaagccttctttcccccttttttccaggctatgcattcctgctgtttcaagatgaaagctctgtgcaggctctcattgatgcatgcattgaagaagatggaaaactctacctttgtgtatcaagtcccactatcaaggataagccagtaagtgtggtttagcataaaatagcttcttgtttttgcctccattcatctgttatatttgaaaaacccatagacaacttgatgtgtttggggtacttaattgacatgtttgtaagcagactaagtagtcttgttgtgaagttcttaacattgacattctgtgtatttgcacatctcaatttgacatcgaatttttggttagttgaaatataattggtaaatctttatttttaaaagatttcacggctgggcatggtggctcacacctgtaatcccagcactttgggaggccgaagcaggtggatcacatgaggtcaggagttcgagaccagcctggccaacatggtgaaatccagtctttactgaaaatacaaaaattagccaggcatggtggcgcacatctgtagtcccagctacttgggagactgaggcaggacaatcacctgaacccaggaggcggaggttgcagtgagcagagattgcaccattgcactccagcctgggtgaaaagtgagactctgtctcaaaataaaataaaataaaataaaataaaataaaaaaccagacttcatttgataatgcatttaataaaatagcagaatcaactctgaataacggaactcaaatcacaaatactatgtgtacgtctttctagcgttttcctcactttaatgaagattttacccaatattatccttaactttatatatggtactctccaaagtagactgaatcgtgtatatacatgtacaggtacattgcatactgttttttctttctggaaaagtttatcataaaatttagtctttaggaagaggagcaactggcatgttttgatgactctggcaaagcagcagtttattatcactcagccagcacccagtgaatgatgatagtgcagaatggagttgtcagtgggcccagcttaagcaaataacatctgtggagcttctcctgaagtcttgtggttgtctaggtcagaaactttcgaagagttcctgtggtctggactctttctgcttgacttgtttatgttccctgccaatccccatccgtatttgaatttgggacctctgacctaggactctgttggtgtgcatatttgggaatacactgctgtcaacccatagcctttggtgtgggcatttgtgacagttagaaaatgtgaacagttttaaatgaggtacatgattcttgattgacttatctaatggatacactgaagtatttgtcataaaaaaaaatctattgcaaatatcatcagtatttttactttgaaaaccattttgaaataatgcatcagatttgatagtatcaggagtagtttgcatttcctagacatacactgattggacacacaattcttgtttacttagtattgtatattgattggcattggataccatgctaaaaatttaaattatgtagatattgaggcattggacagactaaaggcccaaataagctgaaaaacagtgaattaacttacaaataattgtggacatgttaagtaatttggcttataatagacaatcaaattgaactttccaccttggtttagtttacttctaaaaatgaaacgatgggttgggatacactgtttttaaatcttctagtttcccagctttattgacttgtaatcataggattattgcttttaaaaatactttgtaataattgttaacttttttgcccatgaattgtctgtattgagaatgagacattttggtttgtacattccctaggtccagattcggccttggaatctcagtgacagtgactttgtgatggatggttcacagccacttgacccacgaaaaactatatttgttggtggtgttcctcgaccattacgagctggtatgattaaacaaacgacaaactctctaccctatagcgcaagaaatatgaagatcttcaggataaatttttcctaagaattggagttaatatccaagagtgagagttctagaatcaaaatatctgggtttgaattcatgtgttctaatagttaagtgaccttggacaaattccatgacttttctaattcccagtttccccatctgtcaagtagggatgaaaagcgtttcatccctaggatgaaataacaccagaaaaagtatttcctagtgttattttgagggttgaattagacgaccagtgcaaagtacttagtctagtgttgcataatgctaattattacgctcatcattgtctgaaaagaaaaaaagtccttcaagaatagattctgtattgagattgtcagtatttgtttcccacatcctcatttgctcaacagcgactgactgagctctgggatataatagacttcccagcaatgcatcagatttttagggtagtacttacagaacaaattaaattcctaacttcaagtaatttgaggtttaataatatacatgagataaaaagacataacatgaacaggaatgtagctgcacgattttaacacttcataaagaagaaaatgcagtcattatttcaaggtttttttaaatgaaaaattggtgaactgactgtggggaaagagttttgatggaaataagccaggagggcccacaaagagtctaccagttagttttctagtgttcaagtaattattacattaatcaatacattattaactggtaaatctatggcagcaacatggcacagagcaggcaaacatgggagtactatcacttaatgacctgtgaccttggacagatggatcaccctttcagcacctcaatttcctcaggaaattactacctacttcatatagttgtgagaagaataaagagaacatactagaaaacacctagcaaccccttgcccacaattaaaagattaaggcttaacacaatggatgactggttgtagtaatgtttcattttaataattattataatgatgtgagctcagagtacagatgaattgcttttgatgaaacggttggtgagccagatgaattttcctgattttaaatatcctccttgttcctttcttaattagtggagcttgcgatgataatggatcggctatatggaggtgtgtgctacgctgggattgataccgaccctgagctaaaatacccaaaaggagctgggagagttgcgttctctaatcaacagagttacatagctgctatcagtgcccgctttgttcagctgcagcatggagagatagataaacgggtaagccttatactacattttggaaaattctagaaatggtcctctaaatgtgtgattaccaatattagaacgggagcattttatgacaataaagtgacagctgacaattttgcctatagagttaattatggtctataatacatgaaataatgtcctatgaatttcttttatctttcagttttttgagtagcctaatcagaacactacaatttacttgagttaatttaatcttctctaacttccattcaatctcaatccatccgtccattcattcacttagtttgtaagtcattcaataaatatttactgaatcctttgttctgtgttatatcaagtatacaaacaggaatgcccttgaggtttcctgcccttttttttgtttgttttttaatcctgggacatagggaagacctcagcaagccctatttctcaatgaattgtactcacagatttcttttttttttttttctttttccacagccgccacctctcaccgatttattccttagcttggtgtttcatgtattcaacaaacgttttagtgcttagggcaagaagttcctgtcctcatgagtttatttcctagcagatagaactgtatcacttgccagtactactcagagtgtggcctgtggactgacctccagtctgtaaacttagtttgtagtgagataggaatttagaccagaatgtgtaatcaaccacattactgggcacaatgtttggtccagctggcgatttttttttcatagaaagcctttattgatgagggaagcaatatattgatttatattttggggtcacctttttatttcatggcacactggcactttcatgcatgctgactttgatatccatcactctgaggcattgtgctaaaatagattgattttatcgtgttgttctcaattcaagatgtaaaaatcatcaagtcagtagcagtttttgctttttatgtttcatgtcatgtacagtctacttcactggcagtaaaaaaatttaagatagtggtggtcatcctacaaactgtgaatctattaaagagaaaagtatctgttctattctaagcatgggggagggacaagattagtatgttaacatgcctactttgtttgtttgagatggagtctctctccgtcacccaggctggagtgcagtggtacagtctcagctcactccaacctctgcctcccgggttcaagtgattctcctgccttagcctcccgagtaggtggaattacaggcatataccaccatgcccaacaaatgtttgtatttttagtggagacagggtttcaccgtgttggtcaggccagtttcaaactcctgacctcaagggatccacctgcctcaccccctcaaagtgctgggattacaggcatgagccacccaccatgcctggcctacttggttttttatgcacactaaaaaatacctacatctcactgccttattccaacataagtttcagagctgtgggattggtcattagaaattcagactgaatttgtgttcctctgcaatgaaatcctttgcccagtgttcatgtcactctgtagacattatggagcagcctagaggccagaagcccagtgctctccttatgcctgctcttcctgggcttcgtgacactcttcttctccttttgtacttttatttttttagttaaaaaattttttttagagggagggtctcactctgtcacccaggctggagcacagaatcacaatcatgactcactgcatgttcttctccttttgttcatggctaatcttggtcaggattccttgtcagagctgggtggcaccagtgctggtgacagcctgctgtaagggagtttcagccatgaatctctccagactaaaaataaccagctcttttctagctgatgaattaataaccaggtgactgttaatgcttgaaaggttcacatgacaggttggccgatagaacgctggaacaggcccagttttagaaattcacctctgacttttagactcaggtgaaccattcttactgagaaagaacaaagcagggttttagactgtgaatcctatggctgcatctttttttttttttttaacagagttccaggtttgtgattataacccaacatgtgtacactataaatagaaaccacgagccaggctttttacgacagctcagaatcttgtgacgcagtagtcaggcatcttcacaccaacttgaatattgaagtgcagttgtgtggaacttggatcatcttagttgattttgtttaaattatgattccacatatgacaaaaatccagatccactaattaaaatgagggtttatgtctatgaataatctcctgtgggtttaatctcataacattctagtctaaacagttggcttcacttcatgatgtctgctcaaatcctttttcctttaaaggatgtttatttaataagaaaaaaatgtaaaatgatagataataaaagccttactaggttcttaaaagatgaactatccatatttcagtaaatgaataattagtccttcctctttgggcaccttggaacagattcattcagatagtgggtggaaatgtacatgtatggtaagcattgctggcctagtcactgaaaaatgtaaactcttatttttgattgcaggtggaagttaagccatatgtcttggatgatcagctgtgtgatgaatgtcagggggcccgttgtggggggaaatttgctccatttttctgtgctaatgttacctgtctgcagtattactgtgaatattgctgggctgctatccattctcgtgctggcagggaattccacaagcccctggtgaaggaaggcggtgaccgccctcggcatatttcattccgctggaactaaaggataactgcagtgctcattttcaggcctcagaataagtgcactcttctgttcattctgaccccttcctcaacctcttcacgctggcatgtccttttgtagcagtctgtaacttaactatagtataatgaaaagaatgacctataatataggtgttttgtagattcttgtgtcactgcaaacaatatgaactcctttttcgtattgccatcgggttgcatggaagttttattctcttgttttgctggaaaccaagaggatccaaacttcctgcaacattttcttagaggagagagagaaatattaaaagagaaatgaaacaatagagtattttgggtttttaattaaattattgttaataatataacatataagaatacttttattaaaataaccatgcaacaataacactatcggtctatctgacagtttttcccccagggaagtgcttttgccttttcctttcttttttttttttttttcatcttttttgtctctctcttttttccatccctttttaatttttttaacagcaatggaggaagttaacaatttttaatggaaagagcatgttagagcaaacaaatgcataagcaagactgagcagcattataattaattttcagggttttgaggctgaacataatttcattatccctcaaaaagttaccaccacatcagaaaaaataaaaaaaaaatagtaaagtaggcagagctaggtttattttctcttaaacaatttttaaaattcagaatgtaaaaattgggtaaatttactactgaggggagtgcacttatttatttaacttacttatctggtcaaagccccaggaaacctaccaaagctagaattaatgacaactggtgggaaacctagcatttcctctcctgaagaataaatgtataaatgttatttttgatgtttatatataaactctatatcctaatttactaatactcatcagatgtcagcctttgctctccattttgacgttaaaaaacaacaacagatctagagatacctcaaggatatcatttttgattttgtgttacagtacacttgtagccaaaactggaagacaaaaccaatatataatttggctgctgattggcttacttttagatttaaagttactttgggtatcctgtaatttagttgtaacatagaaaatgaaaaaacagttaaaaaaagtgaagtagttgcaaagtgttttgcactgttgaactaagtaactgtgtaaatctgtgcaaaggtacgtatgtttatcttactcttcctataaactaaaataacattacagtttccgaatttagcatgggacatagtcagtgtttgaagtgccaacttcatcaagtaatgcatgctttattataaataaaattctagctttgaaaggcgttatgtgttgaacagtatgcttcaggggtaaatttaaaatagtctcttgaagccctagtcatggaagtaacttttattttaattgacattctcttattaaatgccctatccatcattaaaaggtttattatcagtgggcaaaacatgaaataatatgatcgaatggcaatcttgctagttgcgctacctaacagtaccatcttggatccttcaaaaccaaagacttgccccagcactgctgtggaaccacctggcttatgacccctatggatgatctttaggaaaagcagccctttacttttaatacaggctttaatgaactatacctgttaagttccaaaggtcaaaatggaggcatttgctgtctaatattcaaacatagaaagggagctgcttttaaagaattccctgcaaatactgaaagcagtcatgcgaatggagggtgctcttgtgtagctggtcagggacttttttttcttttctcctgaactacatgattctaattggaatgttcatttgcctctttttactcttttaaatgcttgtaggtggcttggggtgtgctatcgtgctgttcctactcagtaaacaggtgtgatgagttaacaagaaataacactgtttgagaactagctttgaataataatttttccctttgtacatgacctgctgaatttcggtacagtgtttttgtagctaacttattttgtcatgcacataatgtatatttgttatgcactacttttgtatatcttgtttttccaacagtgaacatttttaggcacacttttcactgacgggatatctctttatgcaatacctcaatttttcatattgcaaagagtagctttttgtacttttattactgagagatcttcatatacttcattttttaatataaataattttaataaattttattttcttatattctgctttttatacatttcagtgctctgcatacattttaaattatgaatgtcgtgcactggcaatgctattttagagtctgcagagaagagaaagcatgttgcttaaacatccttccccagcaccagctattggtgtacctataatttaagaaatagtctatgtaaagtcacaaattaatgaaaaaaattcgcatgaaaatgacagataacactgtagttcctaaaaaaaaaattaaatgcataagcataaggtagaaattaaaataacaaaattgtctacagcttcttactaagtttttaaaattattcataaaatgcagacatttttggtgaatgtttagccatttttaatattaataaattgatgttaagtgtttgattcagagatgtctgctcttttaaattatatataaggaaaaaaaatagcctgccttgggacaggtgtgtaatgttagtgtgcatgactaatgtaagaaattgttattctactaatatttacttgtgattgtgtgacaagtgtgtttacagattattggttacacttcaatttacagggcataaacaatgattatctattactctgaactttatgattacatgttcttcagattacatgggattgtagttgggagttaccatgtaactcaaacataattaacatgtaattagtttacagattgtagggcatcacttcaattcaccaagcatgtagttctagcgcactagcatggcgccagccatgtacttacaatgtagttacagagtaattacatggtgatttttgcaatgtaaaataaagtgtttctgattattttctatgtaaaggaaccctctcctttccccttctggtccctgcgctttggtataatatatatacttctccatacacagacctctgcagaatgcaaaataaaacttgcagtgaatgaatttagcattttatgagagtgctgttggaaagacttgataattcaccccttttgttttgaagagttgaatcttctgttaaaaggtgatttaaaacttgaatgtgatgaattgtggcaagttaacttcaagttatgtgcaatacttatttcaaacttttgaaagatctttgcagtgtaattctttgtttttaattgcagacatttaaaaatgtcattttctactgttaagagtaatcctctttcttgctggtgtttctaaagaaaagaatcagaaatcaatctttctactaatgtaaatttgagattatttttaaaaatggaataaaagaggttttggtcatttgctttattttattattttaaagctactgtgattgatagcattgtaagaatcgggacaatattgtattcaactgttttattttttatatttttaaaatttaaagtataattagtttttataattttcatcagatttttgttatattttttggaagtgaaacttttagcaagtgggtgtctagtttttactaatccctaattttttttccagtgtattgctcatattatcagaaggaaaagttatttaagtatgtcagttaattgtactacttggctgaatttccatatagtttttactgtgtatggggaggttgtagtatttattatagcattttaaataagggtaattcattttttattaaagtcattttcacgttaagttcctatttttgtatgttctactcttaagttatataacacagttccttttttaaaagagttcatttgttgaagtgctagtgaaaaattaatgttattaaatagtttgcaaatgactatttataccagtatgcatataatttttaaatatttgtaatgtgagatgttgaatgaataaaacttttaactcagatttcttttaatatacttatttctttttaacacaagtagatgatgctttcttgactgggaatgtaacattttaaaatattaggaatatactgttcagctaatgcagcacaaaccaataggaaaaaatcttcagtcatataagtactgtggccagtgtgcattcttatgtaagcctataagcgtcggtgggtggttgtgtctttggcctgtactgttagttcacctgctgcctgccctgcagagttctttttatttgtagccttcaatatgtatacagggagtaagcccaggatctaagcattcagttatcagttgaaggccaaatgcccaacaaaagtgaaaaacccaatgtttagttaataatgaaagtccgtatctgggaggttcagttttgagtctttgtcaatgaatagtcttgatttgtggccacactaccaaagggcttgaaaacaagtctcttttgacttccaattcccagttcctccatagaccttaatgtcataggatacggtgtgtgggattataatctctatggcatgtcaattgaaaatattatctttgatttgatccattaatcatgtggactaccaagtgctgtaatgtgttagtatttatattttaaactgcattctcaaacttttaacataaggatttattataacaaaatataacactgagaatatcctgttttgtcagatttaatatctgttctttcttgagtatagtattctcaagactagaagaggttcttgtcctgagagaaatggactatgagatcttttgcgtctaagttgtctttcccaacaggcagctcttctaactatagagattactgagggtaagggcaggctggacagcttcccctttctctcatctggcaattcccaaaccttacgttgagcattcaatgaagggccttgaggaaaccccagggatgggacactggagatgtgggtggcatttggttatcaagtctataatattcctaggcattctgggatggtttcactattttaagaaaagaaaaaaaagatagcccaagcatatttagtttattttaggaaatgtttatttcaggtaagtgagatatcaatgatatgtgatataacaactctatcttgaaattacataggtgcattgctttgggtgttttaaatcacagaatggtgtgtctggaaagggtgtaagaggcttcctgggctatatttcttcattcactgattgcctaaacctacccaacgaggaaaattctttttatttttatcttttgtttttactgtctaaccagatgaataaacagtggaaattctctaccacactcttaacaatcaagtcatttcataaccccttttggtaatgggtgtttgtgtccacagctagatcagaaagtaagtactttttctagggatttttttttttttttaagtttgggaaatagtttgatcaaaagtcatggggaaagtaatctctgattttaaaaattgaagaatactgaaggtgt
